(19) United States
(12) Patent Application Publication
(10) Pub. No.: US 2024/0132591 A1
(43) Pub. Date: Apr. 25, 2024

(54) PANCREAS TARGETED THERAPEUTICS AND USES THEREOF

(71) Applicant: PANDION OPERATIONS, INC., Watertown, MA (US)

(72) Inventors: Daniel RIOS, Boston, MA (US); Kevin OTIPOBY, Ashland, MA (US); Joanne L. VINEY, Belmont, MA (US); Nathan HIGGINSON-SCOTT, Hingham, MA (US)

(73) Assignee: PANDION OPERATIONS, INC., Watertown, MA (US)

(21) Appl. No.: 18/264,940

(22) PCT Filed: Feb. 22, 2022
(86) PCT No.: PCT/US2022/070765

§ 371 Date: Aug. 9, 2023

Related U.S. Application Data
(60) Provisional application No. 63/152,030, filed on Feb. 22, 2021.

(51) Int. Cl. C07K 16/28; A61P 3/10

(52) U.S. Cl. CPC C07K 16/2818; A61P 3/10; C07K 16/2803; A61K 2039/505; C07K 2317/31; C07K 2317/622; C07K 2317/75

(57) ABSTRACT

The disclosure relates to methods and compositions for treating Type 1 diabetes, such as compositions comprising an effector domain linked to a protein that binds to MAdCAM.

### CROSS-REFERENCE TO RELATED APPLICATIONS

[0001] This application claims priority to U.S. Provisional Application No. 63/152,030, filed on Feb. 22, 2021, which is hereby incorporated by reference in its entirety.

### SEQUENCE LISTING

[0002] The instant application contains a Sequence Listing which has been submitted electronically in ASCII format and is hereby incorporated by reference in its entirety. Said ASCII copy, created on Feb. 10, 2022, is named 145256_001902_SL and is 739,761 bytes in size.

### FIELD

[0003] The embodiments provided herein relate to, for example, methods and compositions for local or targeted immune-privilege.

### BACKGROUND

[0004] Instances of unwanted immune responses, e.g., as in the rejection of transplanted tissue or in autoimmune disorders, constitute a major health problem for millions of people across the world. Long-term outcomes for organ transplantation are frequently characterized by chronic rejection, and eventual failure of the transplanted organ. More than twenty autoimmune disorders are known, affecting essentially every organ of the body, and affecting over fifty million people in North America alone. The broadly active immunosuppressive medications used to combat the pathogenic immune response in both scenarios have serious side effects. Programmed cell death protein 1 (PD-1) is an inhibitory immune checkpoint molecule present on the surface of T cells, and others. PD-1 binds to two ligands, PD-L1 and PD-L2, minimizing or preventing activation and function of said T cells. PD-1 targeted therapies have emerged as ways of providing local or targeted immune privilege. The present disclosure provides for methods and compounds that provide local or targeted immune privilege.

### SUMMARY

[0005] The present disclosure provides for methods of providing local immune privilege. In some embodiments, methods of treating or preventing Type 1 diabetes comprising administering to a subject in need thereof, an anti-PD-1 agonist antibody linked to an anti-MAdCAM antibody, or antigen binding fragment thereof, are provided. In some embodiments, the anti-MAdCAM antibody, or antigen binding fragment thereof, comprises:
[0006] i) a heavy chain variable region comprising heavy chain CDR1, CDR2, and CDR3 sequences, wherein the heavy chain CDR1 sequence has an amino acid sequence having at least one amino acid substitution relative to SEQ ID NO: 1499; the heavy chain CDR2 has an amino acid sequence having at least one amino acid substitution relative to SEQ ID NO: 1506; and the heavy chain CDR3 has an amino acid sequence having at least one amino acid substitution relative to SEQ ID NOs: 1507, 1531, or 1532; and
[0007] (ii) a light chain variable region comprising light chain CDR1, CDR2, and CDR3 sequences, wherein the light chain CDR1 sequence has an amino acid sequence having at least one amino acid substitution relative to SEQ ID NO: 1502; the light chain CDR2 has an amino acid sequence having at least one amino acid substitution relative to SEQ ID NO: 1497; and the light chain CDR3 has an amino acid sequence having at least one amino acid substitution relative to SEQ ID NO: 1498.

[0008] In some embodiments, methods of treating Type 1 diabetes comprising administering to a subject in need thereof, an effector molecule linked to an antibody, or antigen binding fragment thereof, are provided. In some embodiments, the antibody comprises:
[0009] a light chain variable region comprising an amino acid sequence having at least 90% identity to an amino acid sequence selected from SEQ ID NOs: 592, 1360, 1361, 1362, 1363, 1364, 1365, 1366, 1367, 1368, 1369, 1370, 1371, 1372, 1373, 1374, 1375, 1376, 1380, 1381, 1382, 1383, 1384, 1385, 1386, 1464, 1465, 1466, 1467, or 1543; and
[0010] a heavy chain variable region comprising an amino acid sequence having at least 90% identity to an amino acid sequence selected from SEQ ID NOs: 591, 1346, 1347, 1348, 1349, 1350, 1351, 1352, 1353, 1354, 1355, 1356, 1357, 1358, 1377, 1378, 1379, 1387, 1388, 1389, 1390, 1391, 1392, 1393, 1394, 1395, 1396, 1397, 1398, 1439, 1440, 1441, 1442, 1443, 1444, 1445, 1450, 1451, 1452, 1453, 1454, 1455, 1456, 1457, 1458, 1459, 1460, 1461, 1462, 1463, 1469, 1470, 1471, 1472, 1473, 1474, 1475, 1477, 1480, 1542, 1544, or 1545.

[0011] In some embodiments, methods of delaying, reducing, treating, or preventing hyperglycemia comprising administering, to a subject in need thereof, a composition comprising an effector molecule linked to an anti-MAdCAM antibody, or antigen binding fragment thereof; and a pharmaceutically acceptable carrier, are provided.

[0012] In some embodiments, methods of treating Type 1 diabetes comprising administering to a subject in need thereof, a composition comprising an effector molecule linked to an antibody, or antigen binding fragment thereof, are provided. In some embodiments, the composition comprises:
[0013] a) the antibody is in an scFv orientation and comprises:
   [0014] i) a heavy chain variable region comprising heavy chain CDR1, CDR2, and CDR3 sequences, wherein the heavy chain CDR1 sequence has an amino acid sequence having one or zero amino acid substitution relative to SEQ ID NO: 1499; the heavy chain CDR2 has an amino acid sequence having one or zero amino acid substitution relative to SEQ ID NO: 1506; and the heavy chain CDR3 has an amino acid sequence having one or zero amino acid substitution relative to SEQ ID NOs: 1507, 1531, or 1532; and
   [0015] (ii) a light chain variable region comprising light chain CDR1, CDR2, and CDR3 sequences, wherein the light chain CDR1 sequence has an amino acid sequence having one or zero amino acid substitution relative to SEQ ID NO: 1502; the light chain CDR2 has an amino acid sequence having one or zero amino acid substitution relative to SEQ ID NO: 1497; and the light chain CDR3 has an amino acid sequence having one or zero amino acid substitution relative to SEQ ID NO: 1498; and
[0016] b) the effector molecule is in a Fab orientation and comprises:
   [0017] i) a heavy chain variable region comprising heavy chain CDR1, CDR2, and CDR3 sequences, wherein the heavy chain CDR1 sequence has an amino acid sequence having one or zero amino acid substitution relative to SEQ ID NO: 1481, or 1487; the heavy chain CDR2 has an amino acid sequence having one or zero amino acid substitution relative to SEQ ID NO: 1482, or 1488; and the heavy chain CDR3 has an amino acid sequence having one or zero amino acid substitution relative to SEQ ID NOs: 1483, or 1489; and
   [0018] (ii) a light chain variable region comprising light chain CDR1, CDR2, and CDR3 sequences, wherein the light chain CDR1 sequence has an amino acid sequence having one or zero amino acid substitution relative to SEQ ID NO: 1484, 1490, or 1214; the light chain CDR2 has an amino acid sequence having one or zero amino acid substitution relative to SEQ ID NO: 1485, or 1491; and the light chain CDR3 has an amino acid sequence having one or zero amino acid substitution relative to SEQ ID NO: 1486, or 1492.

[0019] In some embodiments, methods of treating Type 1 diabetes comprising administering to a subject in need thereof, an effector molecule linked to an antibody, or antigen binding fragment thereof, are provided, wherein:
[0020] a) the antibody is in an scFv orientation and comprises:
[0021] a light chain variable region comprising an amino acid sequence having at least 95% identity to an amino acid sequence selected from SEQ ID NOs: 1367; and
[0022] a heavy chain variable region comprising an amino acid sequence having at least 95% identity to an amino acid sequence selected from SEQ ID NOs: 1445; and
[0023] b) the effector molecule is in a Fab orientation and comprises:
[0024] a light chain variable region comprising an amino acid sequence having at least 95% identity to an amino acid sequence selected from SEQ ID NOs: 1359, 1449, or 1479; and
[0025] a heavy chain variable region comprising an amino acid sequence having at least 95% identity to an amino acid sequence selected from SEQ ID NOs: 1438, 1446, 1447, 1448, 1476, or 1478.

### BRIEF DESCRIPTION OF THE DRAWINGS

[0026] FIG. 1 depicts a bi-specific therapeutic compund in a tandem scFv-Fc format containing a targeting scFv domain and an effector domain consisting of either an scFv or a sequence corresponding to the endogenous ligand. The depiction is an example of a non-limiting embodiment of the therapeutic compounds provided herein.

[0027] FIG. 2 depicts a T cell bound to therapeutic componds disclosed herein. In state 1 the effector domain of a bi-specific binds inhibitory receptors of T cells while in systemic circulation, with neither agonism or antagonism of the receptor occurring. In state 2, the targeting domain of bi-specific binds to target organ leading to bi-specific multimerization on the target organ surface. During T cell recognition of target organ, multimerized effector domains bind, cluster and signal through T cell inhibitory molecules. The depiction is an example of a non-limiting illustration of how a therapeutic compound provided herein could function.

[0028] FIG. 3A depicts a non-limiting illustration of the therapeutic compounds provided herein.

[0029] FIG. 3B depicts a non-limiting illustration of the therapeutic compounds provided herein.

[0030] FIG. 4 depicts a non-limiting illustration of the therapeutic compounds provided herein.

[0031] FIG. 5 depicts a non-limiting illustration of the therapeutic compounds provided herein.

[0032] FIG. 6 depicts a non-limiting illustration of the therapeutic compounds provided herein.

[0033] FIG. 7 depicts a non-limiting illustration of the therapeutic compounds provided herein.

[0034] FIG. 8 depicts a non-limiting illustration of the therapeutic compounds provided herein.

[0035] FIG. 9 depicts a non-limiting illustration of the therapeutic compounds provided herein.

[0036] FIG. 10 depicts a non-limiting illustration of the therapeutic compounds provided herein.

[0037] FIG. 11 depicts a non-limiting illustration of the therapeutic compounds provided herein.

[0038] FIG. 12 depicts a non-limiting illustration of the therapeutic compounds provided herein.

[0039] FIG. 13 depicts a non-limiting illustration of the therapeutic compounds provided herein.

[0040] FIG. 14 depicts a non-limiting illustration of the therapeutic compounds provided herein.

[0041] FIG. 15 depicts a non-limiting illustration of the therapeutic compounds provided herein.

[0042] FIG. 16 depicts a non-limiting illustration of the therapeutic compounds provided herein.

[0043] FIG. 17 depicts a non-limiting illustration of the therapeutic compounds provided herein.

[0044] FIG. 18 depicts a non-limiting illustration of the therapeutic compounds provided herein.

[0045] FIG. 19 depicts a non-limiting illustration of the therapeutic compounds provided herein.

[0046] FIGS. 20A and 20B depict localization of PD-1-MAdCAM antibodies in the gut 4 weeks following subcutaneous administration of said antibodies.

[0047] FIG. 21A depicts localization of an anti-PD-1-MAdCAM bispecific molecule in mesenteric lymph node.

[0048] FIG. 21B depicts localization of the anti-PD-1-MAdCAM bispecific molecule in pancreatic lymph node.

[0049] FIG. 21C depicts localization of the anti-PD-1-MAdCAM bispecific molecule in pancreas of NOD mice.

### DETAILED DESCRIPTION

[0050] This application incorporates by reference each of the following in its entirety: U.S. Provisional Application No. 63/115,243 filed Nov. 18, 2020, U.S. Provisional Application No. 63/115,235 filed Nov. 18, 2020, PCT Application No. PCT/US2020/046920 filed Aug. 19, 2020, U.S. Non-Provisional application Ser. No. 16/997,238 filed Aug. 19, 2020, PCT Application No. PCT/US2020/033707 filed May 20, 2020, and U.S. Provisional Application No. 62/850,172, filed May 20, 2019, U.S. application Ser. No. 15/922,592 filed Mar. 15, 2018 and PCT Application No. PCT/US2018/022675, filed Mar. 15, 2018. This application also incorporate by reference, each of the following in their entirety: U.S. Provisional Application No. 62/721,644, filed Aug. 23, 2018, U.S. provisional Application No. 62/675,972 filed May 24, 2018, U.S. provisional Application No. 62/595,357 filed Dec. 6, 2017, U.S. Provisional Application No. 62/595,348, filed Dec. 6, 2017, U.S. Non-Provisional application Ser. No. 16/109,875, filed Aug. 23, 2018, U.S. Non-Provisional application Ser. No. 16/109,897, filed Aug. 23, 2018, U.S. Non-Provisional application Ser. No. 15/988,311, filed May 24, 2018, PCT Application No. PCT/US2018/034334, filed May 24, 2018, and, PCT/US2018/062780, filed Nov. 28, 2018, each of which is hereby incorporated by reference in their entirety.

[0051] As used herein and in the appended claims, the singular forms “a”, “an” and “the” include plural reference unless the context clearly dictates otherwise.

[0052] As used herein, the term “about” means that the numerical value is approximate and small variations would not significantly affect the practice of the disclosed embodiments. Where a numerical limitation is used, unless indicated otherwise by the context, “about” means the numerical value can vary by +5% and remain within the scope of the disclosed embodiments. Thus, about 100 means 95 to 105.

[0053] As used herein, the term “animal” includes, but is not limited to, humans and non-human vertebrates such as wild, domestic, and farm animals. As used herein, the term “mammal” means a rodent (i.e., a mouse, a rat, or a guinea pig), a monkey, a cat, a dog, a cow, a horse, a pig, or a human. In some embodiments, the mammal is a human.

[0054] As used herein, the term “contacting” means bringing together of two elements in an in vitro system or an in vivo system. For example, “contacting” a therapeutic compound with an individual or patient or cell includes the administration of the compound to an individual or patient, such as a human, as well as, for example, introducing a compound into a sample containing a cellular or purified preparation containing target.

[0055] As used herein, the terms “comprising” (and any form of comprising, such as “comprise”, “comprises”, and “comprised”), “having” (and any form of having, such as “have” and “has”), “including” (and any form of including, such as “includes” and “include”), or “containing” (and any form of containing, such as “contains” and “contain”), are inclusive or open-ended and do not exclude additional, unrecited elements or method steps. Any composition or method that recites the term “comprising” should also be understood to also describe such compositions as consisting, consisting of, or consisting essentially of the recited components or elements.

[0056] As used herein, the term “fused” or “linked” when used in reference to a protein having different domains or heterologous sequences means that the protein domains are part of the same peptide chain that are connected to one another with either peptide bonds or other covalent bonding. The domains or section can be linked or fused directly to one another or another domain or peptide sequence can be between the two domains or sequences and such sequences would still be considered to be fused or linked to one another. In some embodiments, the various domains or proteins provided for herein are linked or fused directly to one another or a linker sequences, such as the glycine/serine sequences described herein link the two domains together. Two peptide sequences are linked directly if they are directly connected to one another or indirectly if there is a linker or other structure that links the two regions. A linker can be directly linked to two different peptide sequences or domains.

[0057] As used herein, the term “individual,” “subject,” or “patient,” used interchangeably, means any animal, including mammals, such as mice, rats, other rodents, rabbits, dogs, cats, swine, cattle, sheep, horses, or primates, such as humans.

[0058] As used herein, the term “inhibit” refers to a result, symptom, or activity being reduced as compared to the activity or result in the absence of the compound that is inhibiting the result, symptom, or activity. In some embodiments, the result, symptom, or activity, is inhibited by about, or, at least, 10%, 20%, 30%, 40%, 50%, 60%, 70%, 80%, 90%, 95%, or 99%. A result, symptom, or activity can also be inhibited if it is completely elimination or extinguished.

[0059] As used herein, the phrase “in need thereof” means that the subject has been identified as having a need for the particular method or treatment. In some embodiments, the identification can be by any means of diagnosis. In any of the methods and treatments described herein, the subject can be in need thereof. In some embodiments, the subject is in an environment or will be traveling to an environment in which a particular disease, disorder, or condition is prevalent. In some embodiments, the subject is at risk of developing a particular disease or disorder that a treatment is intended to treat and/or prevent. Those “in need of treatment” include those patients that may benefit form treatment with the methods of the inventions, e.g. a patient suffering from or at risk of developing an autoimmune disorder or diabetes.

[0060] As used herein, the phrase “integer from X to Y” means any integer that includes the endpoints. For example, the phrase “integer from 1 to 5” means 1, 2, 3, 4, or 5.

[0061] In some embodiments, therapeutic compounds are provided herein. In some embodiments, the therapeutic compound is a protein or a polypeptide, that has multiple peptide chains that interact with one another. The polypeptides can interact with one another through non-covalent interactions or covalent interactions, such as through disulfide bonds or other covalent bonds. Therefore, if an embodiment refers to a therapeutic compound it can also be said to refer to a protein or polypeptide as provided for herein and vice versa as the context dictates.

[0062] As used herein, the phrase “ophthalmically acceptable” means having no persistent detrimental effect on the treated eye or the functioning thereof, or on the general health of the subject being treated. However, it will be recognized that transient effects such as minor irritation or a “stinging” sensation are common with topical ophthalmic administration of drugs and the existence of such transient effects is not inconsistent with the composition, formulation, or ingredient (e.g., excipient) in question being “ophthalmically acceptable” as herein defined. In some embodiments, the pharmaceutical compositions can be ophthalmically acceptable or suitable for ophthalmic administration.

[0063] “Specific binding” or “specifically binds to” or is “specific for” a particular antigen, target, or an epitope means binding that is measurably different from a non-specific interaction. Specific binding can be measured, for example, by determining binding of a molecule compared to binding of a control molecule, which generally is a molecule of similar structure that does not have binding activity. For example, specific binding can be determined by competition with a control molecule that is similar to the target.

[0064] Specific binding for a particular antigen, target, or an epitope can be exhibited, for example, by an antibody having a K_{D} for an antigen or epitope of at least about 10^{-4M}, at least about 10^{-5M}, at least about 10^{-6M}, at least about 10^{-7M}, at least about 10^{-8M}, at least about 10^{-9M} alternatively at least about 10^{-10M} at least about 10^{-11M} at least about 10^{-12M}, or greater, where K_{D} refers to a dissociation rate of a particular antibody-target interaction. Typically, an antibody that specifically binds an antigen or target will have a K_{D} that is, or at least, 2-, 4-, 5-, 10-, 20-, 50-, 100-, 500-, 1000-, 5,000-, 10,000-, or more times greater for a control molecule relative to the antigen or epitope.

[0065] In some embodiments, specific binding for a particular antigen, target, or an epitope can be exhibited, for example, by an antibody having a K_{A} or Kₐ for a target, antigen, or epitope of at least 2-, 4-, 5-, 20-, 50-, 100-, 500-, 1000-, 5,000-, 10,000- or more times greater for the target, antigen, or epitope relative to a control, where K_{A} or Kₐ refers to an association rate of a particular antibody-antigen interaction.

[0066] As provided herein, the therapeutic compounds and compositions can be used in methods of treatment as provided herein. As used herein, the terms “treat,” “treated,” or “treating” mean both therapeutic treatment and prophylactic measures wherein the object is to slow down (lessen) an undesired physiological condition, disorder or disease, or obtain beneficial or desired clinical results. For purposes of these embodiments, beneficial or desired clinical results include, but are not limited to, alleviation of symptoms; diminishment of extent of condition, disorder or disease; stabilized (i.e., not worsening) state of condition, disorder or disease; delay in onset or slowing of condition, disorder or disease progression; amelioration of the condition, disorder or disease state or remission (whether partial or total), whether detectable or undetectable; an amelioration of at least one measurable physical parameter, not necessarily discernible by the patient; or enhancement or improvement of condition, disorder or disease. Treatment includes eliciting a clinically significant response without excessive levels of side effects. Treatment also includes prolonging survival as compared to expected survival if not receiving treatment. Thus, “treatment of an auto-immune disease/disorder” means an activity that alleviates or ameliorates any of the primary phenomena or secondary symptoms associated with the auto-immune disease/disorder or other condition described herein. Methods for the treatment of various diseases or conditions are provided herein. The therapeutic treatment can also be administered prophylactically to preventing or reduce the disease or condition before the onset.

### PD-1 Agonists

[0067] Provided herein are therapeutic compounds, e.g., therapeutic protein molecules, e.g., fusion proteins, including a targeting moiety and an effector binding/modulating moiety, typically as separate domains. Also provided are methods of using and making the therapeutic compounds. The targeting moiety serves to localize the therapeutic compound, and thus the effector binding/modulating moiety, to a site at which immune-privilege is desired. As used herein, “immune privilege” means lack of, or suppression of an inflammatory response. As a non-limiting example, immune privilege includes situations where a tissue or site in the body is able to tolerate the introduction of antigens without eliciting an inflammatory immune response (Forester J. V., Lambe H. Xu, Cornall R. Immune Privilege or privileged immunity? Mucosal Immunology, 1, 372-381 (2008)).

[0068] The effector binding/modulating moiety comprises one or more of: (a) an immune cell inhibitory molecule binding/modulating moiety (an ICIM binding/modulating moiety): (b) an immunosuppressive immune cell binding/modulating moiety (an IIC binding/modulating moiety); (c) a soluble molecule binding/modulating moiety (a SM binding/modulating moiety) or (d) a molecule that blocks or inhibits immune cell stimulatory molecule binding/modulating moiety (referred to herein as an ICSM binding/modulating moiety). In some embodiments, the ICSM inhibits immune activation by, for example, blocking the interaction between a costimulatory molecule and its counterstructure. In some embodiments, a therapeutic compound comprises: (a) and (b); (a) and (c); (a) and (d); (b) and (c); (b) and (d); (c) and (d); or (a), (b), (c), and (d).

[0069] The present disclosure provides, for example, molecules that can act as PD-1 agonists. Without being bound to any particular theory, agonism of PD-1 inhibits T cell activation/signaling and can be accomplished by different mechanisms. For example crosslinking of bead-bound functional PD-1 agonists can lead to agonism. Functional PD-1 agonists have been described (Akkaya. Ph.D. Thesis: Modulation of the PD-1 pathway by inhibitory antibody superagonists. Christ Church College, Oxford, UK, 2012), which is hereby incorporated by reference. Crosslinking of PD-1 with two mAbs that bind non-overlapping epitopes induces PD-1 signaling (Davis, US 2011/0171220), which is hereby incorporated by reference. Another example is illustrated through the use of a goat anti-PD-1 antiserum (e.g. AF1086, R&D Systems), which acts as an agonist when soluble (Said et al., 2010, Nat Med. 2010 April; 16(4):452-9) which is hereby incorporated by reference. Non-limiting examples of PD-1 agonists that can be used in the present embodiments include, but are not limited to, UCB clone 19 or clone 10, PD1AB-1, PD1AB-2, PD1AB-3, PD1AB-4 and PD1AB-5, PD1AB-6 (Anaptys/Celgene), PD1-17, PD1-28, PD1-33 and PD1-35 (Collins et al, US 2008/0311117 A1 Antibodies against PD-1 and uses therefor, which is incorporated by reference), or can be a bi-specific, monovalent anti-PD-1/anti-CD3 (Ono), and the like. In some embodiments, the PD-1 agonist antibodies can be antibodies that block binding of PD-L1 to PD-1. In some embodiments, the PD-1 agonist antibodies can be antibodies that do not block binding of PD-L1 to PD-1.

[0070] PD-1 agonism can be measured by any method, such as the methods described in the examples. For example, cells can be constructed that express, including stably express, constructs that include a human PD-1 polypeptide fused to a β-galactosidase “Enzyme donor” and 2) a SHP-2 polypeptide fused to a β-galactosidase “Enzyme acceptor.” Without being bound by any theory, when PD-1 is engaged, SHP-2 is recruited to PD-1. The enzyme acceptor and enzyme donor form a fully active b-galactosidase enzyme that can be assayed. Although, the assay does not directly show PD-1 agonism, but shows activation of PD-1 signaling. PD-1 agonism can also be measured by measuring inhibition of T cell activation because, without being bound to any theory, PD-1 agonism inhibits anti-CD3-induced T cell activation. For example, PD-1 agonism can be measured by preactivating T cells with PHA (for human T cells) or ConA (for mouse T cells) so that they express PD-1. The cells can then be reactivated with anti-CD3 in the presence of anti-PD-1 (or PD-L1) for the PD-1 agonism assay. T cells that receive a PD-1 agonist signal in the presence of anti-CD3 will show decreased activation, relative to anti-CD3 stimulation alone. Activation can be readout by proliferation or cytokine production (IL-2, IFNg, IL-17) or other markers, such as CD69 activation marker. Thus, PD-1 agonism can be measured by either cytokine production or cell proliferation. Other methods can also be used to measure PD-1 agonism.

[0071] PD-1 is an Ig superfamily member expressed on activated T cells and other immune cells. The natural ligands for PD-1 appear to be PD-L1 and PD-L2. Without being bound to any particular theory, when PD-L1 or PD-L2 bind to PD-1 on an activated T cell, an inhibitory signaling cascade is initiated, resulting in attenuation of the activated T effector cell function. Thus, blocking the interaction between PD-1 on a T cell, and PD-L1/2 on another cell (for example, a tumor cell) with a PD-1 antagonist is known as checkpoint inhibition, and releases the T cells from inhibition. In contrast, PD-1 agonist antibodies can bind to PD-1 and send an inhibitory signal and attenuate the function of a T cell. Thus, PD-1 agonist antibodies can be incorporated into various embodiments described herein as an effector molecule binding/modulating moiety (sometimes also referred to herein as an effector molecule), which can accomplish localized tissue-specific immunomodulation when paired with a targeting moiety.

[0072] The effector molecule binding/modulating moiety can provide an immunosuppressive signal or environment in a variety of ways. In some embodiments, the effector binding/modulating moiety comprises an ICIM binding/modulating moiety that directly binds and (under the appropriate conditions as described herein) activates an inhibitory receptor expressed by immune cells responsible for driving disease pathology. In another embodiment the effector binding/modulating moiety comprises and IIC binding/modulating moiety and binds and accumulates immunosuppressive immune cells. In some embodiments, the accumulated immune suppressive cells promote immune privilege. In another embodiment the effector binding/modulating moiety comprises an SM binding/modulating moiety which manipulates the surrounding microenvironment to make it less permissible for the function of immune cells, e.g., immune cells driving disease pathology. In some embodiments, the SM binding/modulating moiety depletes an entity that promotes immune attack or activation. In some embodiments the effector binding/modulating moiety comprises an ICSM binding/modulating moiety that binds a member of a pair of stimulatory molecules, e.g., costimulatory molecules, and inhibits the interaction between the costimulatory molecule and the costimulatory molecule counterstructure, such as, but not limited to, OX40 or CD30 or CD40 and OX40L, or CD30L or CD40L and inhibits the immune stimulation of a cell, such as, but not limited to, a T cell, B cell, NK cell, or other immune cell comprising a member of the pair.

[0073] The targeting moiety and effector binding/modulating moiety are physically tethered, covalently or non-covalently, directly or through a linker entity, to one another, e.g., as a member of the same protein molecule in a therapeutic protein molecule. In some embodiments, the targeting and effector moieties are provided in a therapeutic protein molecule, e.g., a fusion protein, typically as separate domains. In some embodiments, the targeting moiety, the effector binding/modulating moiety, or both each comprises a single domain antibody molecule, e.g., a camelid antibody VHH molecule or human soluble VH domain. It may also contain a single-chain fragment variable (scFv) or a Fab domain. In some embodiments, the therapeutic protein molecule, or a nucleic acid, e.g., an mRNA or DNA, encoding the therapeutic protein molecule, can be administered to a subject. In some embodiments, the targeting and effector molecule binding/modulating moieties are linked to a third entity, e.g., a carrier, e.g., a polymeric carrier, a dendrimer, or a particle, e.g., a nanoparticle. The therapeutic compounds can be used to down regulate an immune response at or in a tissue at a selected target or site while having no or substantially less immunosuppressive function systemically. The target or site can comprise donor tissue or autologous tissue.

[0074] Provided herein are methods of providing site-specific immune privilege for a transplanted donor tissue, e.g., an allograft tissue, e.g., a tissue described herein, e.g., an allograft liver, an allograft kidney, an allograft heart, an allograft pancreas, an allograft thymus or thymic tissue, allograft skin, or an allograft lung, with therapeutic compounds disclosed herein. In embodiments the treatment minimizes rejection of, minimizes immune effector cell mediated damage to, prolongs acceptance of, or prolongs the functional life of, donor transplant tissue.

[0075] Also provided herein are methods of inhibiting graft versus host disease (GVHD) by minimizing the ability of donor immune cells, e.g., donor T cells, to mediate immune attack of recipient tissue, with therapeutic compounds disclosed herein.

[0076] Also provided herein are methods of treating, e.g., therapeutically treating or prophylactically treating (or preventing), an auto-immune disorder or autoimmune response in a subject by administration of a therapeutic compound disclosed herein, e.g., to provide site or tissue specific modulation of the immune system. In some embodiments, the method provides tolerance to, minimization of the rejection of, minimization of immune effector cell mediated damage to, or prolonging a function of, subject tissue. In some embodiments, the therapeutic compound includes a targeting moiety that targets, e.g., specifically targets, the tissue under, or at risk for, autoimmune attack. Non-limiting exemplary tissues include, but are not limited to, the pancreas, myelin, salivary glands, synoviocytes, and myocytes.

[0077] In some embodiments, administration of the therapeutic compound begins after the disorder is apparent. In some embodiments, administration of the therapeutic compound, begins prior to onset, or full onset, of the disorder. In some embodiments, administration of the therapeutic compound, begins prior to onset, or full onset, of the disorder, e.g., in a subject having the disorder, a high-risk subject, a subject having a biomarker for risk or presence of the disorder, a subject having a family history of the disorder, or other indicator of risk of, or asymptomatic presence of, the disorder. For example, in some embodiments, a subject having islet cell damage but which is not yet diabetic, is treated.

[0078] While not wishing to be bound by theory, it is believed that the targeting moiety functions to bind and accumulate the therapeutic compound to a target selectively expressed at the anatomical site where immune privilege is desired. In some embodiments, e.g., in the context of donor tissue transplantation, the target moiety binds to a target, e.g., an allelic product, present in the donor tissue but not the recipient. For treatment of autoimmune disorders, the targeting moiety binds a target preferentially expressed at the anatomical site where immune privilege is desired, e.g., in the pancreas. In some embodiments, the polypeptide or antibody of the disclosure binds to a pancreatic cell. In some embodiments, the pancreatic cell is a pancreatic endothelial cell. For treatment of GVHD, the targeting moiety targets the host tissue, and protects the host against attack from transplanted immune effector cells derived from transplanted tissue.

[0079] Again, while not wishing to be bound by theory it is believed that the effector binding/modulating moiety serves to deliver an immunosuppressive signal or otherwise create an immune privileged environment.

[0080] Effector, as that term is used herein, refers to an entity, e.g., a cell or molecule, e.g., a soluble or cell surface molecule, which mediates an immune response.

[0081] Effector ligand binding molecule, as used herein, refers to a polypeptide that has sufficient sequence from a naturally occurring counter-ligand of an effector, that it can bind the effector with sufficient specificity that it can serve as an effector binding/modulating molecule. In some embodiments, it binds to effector with at least 10, 20, 30, 40, 50, 60, 70, 80, 90, or 95% of the affinity of the naturally occurring counter-ligand. In some embodiments, it has at least 60, 70, 80, 90, 95, 99, or 100% sequence identity, or substantial sequence identity, with a naturally occurring counter-ligand for the effector.

[0082] Effector specific binding polypeptide, as used herein, refers to a polypeptide that can bind with sufficient specificity that it can serve as an effector binding/modulating moiety. In some embodiments, a specific binding polypeptide comprises an effector ligand binding molecule.

[0083] Unless otherwise defined, all technical and scientific terms used herein have the same meaning as commonly understood by one of ordinary skill in the art to which these embodiments belong. Although methods and materials similar or equivalent to those described herein can be used in the practice or testing of the present embodiments, suitable methods and materials are described below. All publications, patent applications, patents, and other references mentioned herein are incorporated by reference in their entirety. In addition, the materials, methods, and examples are illustrative only and not intended to be limiting. Headings, sub-headings or numbered or lettered elements, e.g., (a), (b), (i) etc., are presented merely for ease of reading. The use of headings or numbered or lettered elements in this document does not require the steps or elements be performed in alphabetical order or that the steps or elements are necessarily discrete from one another. Other features, objects, and advantages of the embodiments will be apparent from the description and drawings, and from the claims.

### Additional Definitions

[0084] Unless defined otherwise, all technical and scientific terms used herein have the same meaning as commonly understood by one of ordinary skill in the art to which the embodiments pertains. In describing and claiming the present embodiments, the following terminology and terminology otherwise referenced throughout the present application will be used according to how it is defined, where a definition is provided.

[0085] It is also to be understood that the terminology used herein is for the purpose of describing particular embodiments only, and is not intended to be limiting.

[0086] Antibody molecule, as that term is used herein, refers to a polypeptide, e.g., an immunoglobulin chain or fragment thereof, comprising at least one functional immunoglobulin variable domain sequence. An antibody molecule encompasses antibodies (e.g., full-length antibodies) and antibody fragments. In some embodiments, an antibody molecule comprises an antigen binding or functional fragment of a full length antibody, or a full length immunoglobulin chain. For example, a full-length antibody is an immunoglobulin (Ig) molecule (e.g., an IgG antibody) that is naturally occurring or formed by normal immunoglobulin gene fragment recombinatorial processes). In embodiments, an antibody molecule refers to an immunologically active, antigen-binding portion of an immunoglobulin molecule, such as an antibody fragment. An antibody fragment, e.g., functional fragment, comprises a portion of an antibody, e.g., Fab, Fab′, F(ab′)2, F(ab)2, variable fragment (Fv), domain antibody (dAb), or single chain variable fragment (scFv). A functional antibody fragment binds to the same antigen as that recognized by the intact (e.g., full-length) antibody. The terms “antibody fragment” or “functional fragment” also include isolated fragments consisting of the variable regions, such as the “Fv” fragments consisting of the variable regions of the heavy and light chains or recombinant single chain polypeptide molecules in which light and heavy variable regions are connected by a peptide linker (“scFv proteins”). In some embodiments, an antibody fragment does not include portions of antibodies without antigen binding activity, such as Fc fragments or single amino acid residues. Exemplary antibody molecules include full length antibodies and antibody fragments, e.g., dAb (domain antibody), single chain, Fab, Fab′, and F(ab′)2 fragments, and single chain variable fragments (scFvs).

[0087] Immunoglobulin chains exhibit the same general structure of relatively conserved framework regions (FR) joined by three hypervariable regions, also called complementarity determining regions or CDRs. The CDRs from the two chains of each pair are aligned by the framework regions, enabling binding to a specific epitope. From N-terminus to C-terminus, both light and heavy chains comprise the domains FR1, CDR1, FR2, CDR2, FR3, CDR3 and FR4. The assignment of amino acids to each domain is in accordance with the definitions of Kabat Sequences of Proteins of Immunological Interest (National Institutes of Health, Bethesda, Md. (1987 and 1991)), or Chothia & Lesk J. Mol. Biol. 196:901-917 (1987); Chothia et al. Nature 342:878-883 (1989). In some embodiments, the antibodies provided herein comprise the same FRs and different CDRs. In some embodiments, the antibodies provided herein comprise the same CDRs and different FRs. In some embodiments, mutations in the FR are in the heavy chain. In some embodiments, mutations in the FR are in the FR1 of the heavy chain. In some embodiments, mutations in the FR are in the FR2 of the heavy chain. In some embodiments, mutations in the FR are in the FR3 of the heavy chain. In some embodiments, mutations in the FR are in the FR4 of the heavy chain. In some embodiments, mutations in the FR are in the light chain. In some embodiments, mutations in the FR are in the FR1 of the light chain. In some embodiments, mutations in the FR are in the FR2 of the light chain. In some embodiments, mutations in the FR are in the FR3 of the light chain. In some embodiments, mutations in the FR are in the FR4 of the light chain. In some embodiments, mutations in the FR are in the heavy and light chains. In some embodiments, mutations in the FR are in any one or more of the FRs of the heavy and light chains.

[0088] The term “antibody molecule” also encompasses whole or antigen binding fragments of domain, or single domain, antibodies, which can also be referred to as “sdAb” or “VHH.” Domain antibodies comprise either VH or VL that can act as stand-alone, antibody fragments. Additionally, domain antibodies include heavy-chain-only antibodies (HCAbs). Domain antibodies also include a CH2 domain of an IgG as the base scaffold into which CDR loops are grafted. It can also be generally defined as a polypeptide or protein comprising an amino acid sequence that is comprised of four framework regions interrupted by three complementarity determining regions. This is represented as FR1-CDR1-FR2-CDR2-FR3-CDR3-FR4. sdAbs can be produced in camelids such as llamas, but can also be synthetically generated using techniques that are well known in the art. The numbering of the amino acid residues of a sdAb or polypeptide is according to the general numbering for VH domains given by Kabat et al. (“Sequence of proteins of immunological interest,” US Public Health Services, NIH Bethesda, MD, Publication No. 91, which is hereby incorporated by reference). According to this numbering, FR1 of a sdAb comprises the amino acid residues at positions 1-30, CDR1 of a sdAb comprises the amino acid residues at positions 31-36, FR2 of a sdAb comprises the amino acids at positions 36-49, CDR2 of a sdAb comprises the amino acid residues at positions 50-65, FR3 of a sdAb comprises the amino acid residues at positions 66-94, CDR3 of a sdAb comprises the amino acid residues at positions 95-102, and FR4 of a sdAb comprises the amino acid residues at positions 103-113. Domain antibodies are also described in WO2004041862 and WO2016065323, each of which is hereby incorporated by reference. The domain antibodies can be a targeting moiety as described herein.

[0089] Antibody molecules can be monospecific (e.g., monovalent or bivalent), bispecific (e.g., bivalent, trivalent, tetravalent, pentavalent, or hexavalent), trispecific (e.g., trivalent, tetravalent, pentavalent, hexavalent), or with higher orders of specificity (e.g., tetraspecific) and/or higher orders of valency beyond hexavalency. An antibody molecule can comprise a functional fragment of a light chain variable region and a functional fragment of a heavy chain variable region, or heavy and light chains may be fused together into a single polypeptide.

[0090] Examples of formats for multispecific therapeutic compounds, e.g., bispecific antibody molecules are shown in the following non-limiting examples. Although illustrated with antibody molecules, they can be used as platforms for therapeutic molecules that include other non-antibody moieties as specific binding or effector moieties. In some embodiments, these non-limiting examples are based upon either a symmetrical or asymmetrical Fc formats.

[0091] For example, the figures illustrate non-limiting and varied symmetric homodimer approach. In some embodiments, the dimerization interface centers around human IgG1 CH2-CH3 domains, which dimerize via a contact interface spanning both CH2/CH2 and CH3/CH3. The resulting bispecific antibodies shown have a total valence comprised of four binding units with two identical binding units at the N-terminus on each side of the dimer and two identical units at the C-terminus on each side of the dimer. In each case the binding units at the N-terminus of the homo-dimer are different from those at the C-terminus of the homo-dimer. Using this type of bivalency for both an inhibitory T cell receptor at either terminus of the molecule and bivalency for a tissue tethering antigen can be achieved at either end of the molecule.

[0092] For example, in FIG. 3A, a non-limiting embodiment is illustrated. The N-terminus of the homodimer contains two identical Fab domains comprised of two identical light chains, which are separate polypeptides, interfaced with the n-terminal VH-CH1 domains of each heavy chain via the VH/VL interaction and Ckappa or Clambda interaction with CH1. The native disulfide bond between the Ckappa or Clambda with CH1 is present providing a covalent anchor between the light and heavy chains. At the c-terminus of this design are two identical scFv units where by (in this example) the c-terminus of the CH3 domain of the Fc, is followed by a flexible, hydrophilic linker typically comprised of (but not limited to) serine, glycine, alanine, and/or threonine residues, which is followed by the VH domain of each scFv unit, which is followed by a glycine/serine rich linker, followed by a VL domain. These tandem VH and VL domains associate to form a single chain fragment variable (scFv) appended at the c-terminus of the Fc. Two such units exist at the c-terminus of this molecule owing to the homodimeric nature centered at the Fc. The domain order of scFvs may be configured to be from N to C terminus either VH-Linker-VL or VL-Linker-VH.

[0093] A non-limiting example of a molecule that has different binding regions on the different ends includes a molecule that comprises, a PD-1 agonist at one end and an antibody that provides target specificity, particularly, an anti-MAdCAM-1 antibody at the other end. This can be illustrated as shown, for example, in FIG. 3B, which illustrates the molecules in different orientations.

[0094] In some embodiments, the MAdCAM antibody is a blocking or non-blocking antibody as described elsewhere herein. Without being bound to any theory, MAdCAM has been shown to interact with the headpiece of the integrin α4β7 expressed on lymphocytes via multiple residues within its two Ig superfamily I-set domains and the atomic level structural basis for that interaction has been described (Viney J L et al. (1996). J Immunol. 157, 2488-2497; Yu Y et al (2013). J Biol Chem. 288, 6284-6294; Yu Y et al (2012). J Cell Biol. 196, 131-146, each of which is incorporated by reference in its entirety). It has been shown in great structural, mechanistic and functional detail in both human (Chen J et al (2003). Nat Struct Biol. 10, 995-1001; de Chateau M et al (2001). Biochemistry. 40, 13972-13979) and mouse (Day E S et al (2002). Cell Commun Adhes. 9, 205-219; Hoshino H et al (2011). J Histochem Cytochem. 59, 572-583) molecular systems that any interaction of MAdCAM with α4β7 is dependent on three dication binding sites present in the integrin beta 7 subunit I-like domain and that these metal binding sites can coordinate with Ca2+, Mn2+, and Mg2+. Using cell adhesion assays, flow cytometry, and/or flow chamber assays in the presence of high levels of Ca2+ with or without Mg2+ or Mn2+, the MAdCAM/α4β7 interaction is shown to be of a lower functional affinity and permits rolling adhesion of lymphocytes, whereas in low Ca2+ but higher Mg2+ or Mn2+ which activates the integrin, the MAdCAM/α4β7 interaction is of a higher functional affinity and mediates firm lymphocyte adhesion (Chen J et al (2003). Nat Struct Biol. 10, 995-1001). A number of groups have shown that various cell:cell, cell:membrane prep, and/or cell:protein based adhesion/interaction assays can be utilized, with FACS, cell flow chamber based counts, or IHC based read-outs to monitor the impact of anti-MAdCAM or anti-α4β7 antibodies upon the interaction of MAdCAM with α4β7, allowing one to identify blocking or non-blocking antibodies (Nakache, M et al (1989). Nature. 337, 179-181; Streeter, P R et al (1988). Nature. 331. 41-46; Yang Y et al (1995). Scand J Immunol. 42. 235-247; Leung E et al (2004). Immunol Cell Biol. 82. 400-409; Pullen N et al (2009). B J Pharmacol. 157. 281-293; Soler D et al (2009). J Pharmacol Exp Ther. 330. 864-875; Qi J et al (2012). J Biol Chem. 287. 15749-15759). This has been exemplified in the mouse system setting with the identification of anti-mouse MAdCAM antibodies such as MECA-89 (non-blocking) and MECA-367 (blocking)) Nakache, M et al (1989). Nature. 337, 179-181; Streeter, P R et al (1988). Nature. 331. 41-46; Yang Y et al (1995). Scand J Immunol. 42. 235-247). In a human system, antibodies have been identified that block the interaction of human MAdCAM with human α4β7 such as anti-human MAdCAM PF-00547659 (Pullen N et al (2009). B J Pharmacol. 157. 281-293) and anti-human α4β7 vedolizumab (Soler D et al (2009). J Pharmacol Exp Ther. 330. 864-875), as well as antibodies that do not block the interaction such as anti-human MAdCAM clone 17F5 (Soler D et al (2009). J Pharmacol Exp Ther. 330. 864-875), and anti-human α4β7 clone J19 (Qi J et al (2012). J Biol Chem. 287. 15749-15759). Thus, the antibody can either be blocking or non-blocking based upon the desired effect. In some embodiments, the antibody is a non-blocking MAdCAM antibody. In some embodiments, the antibody is a blocking MAdCAM antibody. One non-limiting example of demonstrating whether an antibody is blocking or non-blocking can be found throughout the examples, but any method can be used. Each of the references described herein are incorporated by reference in its entirety. In some embodiments, the PD-1 Agonist is replaced with an IL-2 mutein, such as, but not limited to, the ones described herein.

[0095] In another example, and as depicted in FIG. 4, the N-terminus of the homodimer contains two identical Fab domains comprised of two identical light chains, which are separate polypeptides, interfaced with the N-terminal VH-CH1 domains of each heavy chain via the VH/VL interaction and Ckappa or Clambda interaction with CH1. The native disulfide bond between the Ckappa or Clambda with CH1 is present providing a covalent anchor between the light and heavy chains. At the C-terminus of this design are two identical VH units (though non-antibody moieties could also be substituted here or at any of the four terminal attachment/fusion points) where by (in this example) the C-terminus of the CH3 domain of the Fc, is followed by a flexible, hydrophilic linker typically comprised of (but not limited to) serine, glycine, alanine, and/or threonine residues, which is followed by a soluble independent VH3 germline family based VH domain. Two such units exist at the C-terminus of this molecule owing to the homodimeric nature centered at the Fc.

[0096] In another non-limiting example, as depicted in FIG. 5, the N-terminus of the homodimer contains two identical Fab domains comprised of two identical light chains, which, unlike FIG. 3A and FIG. 4, are physically conjoined with the heavy chain at the N-terminus via a linker between the c-terminus of Ckappa or Clambda and the N-terminus of the VH. The linker may be 36-80 amino acids in length and comprised of serine, glycine, alanine and threonine residues. The physically conjoined n-terminal light chains interface with the n-terminal VH-CH1 domains of each heavy chain via the VH/VL interaction and Ckappa or Clambda interaction with CH1. The native disulfide bond between the Ckappa or Clambda with CH1 is present providing additional stability between the light and heavy chains. At the c-terminus of this design are two identical Fab units where by (in this example) the c-terminus of the CH3 domain of the Fc, is followed by a flexible, hydrophilic linker typically comprised of (but not limited to) serine, glycine, alanine, and/or threonine residues, which is followed by a CH1 domain, followed by a VH domain at the c-terminus. The light chain that is designed to pair with the c-terminal CH1/VH domains is expressed as a separate polypeptide, unlike the N-terminal light chain which is conjoined to the n-terminal VH/CH1 domains as described. The C-terminal light chains form an interface at between VH/VL and Ckappa or Clambda with CH1. The native disulfide anchors this light chain to the heavy chain. Again, any of the antibody moieties at any of the four attachment/fusion points can be substituted with a non-antibody moiety, e.g., an effector binding/modulating moiety that does not comprise an antibody molecule.

[0097] The bispecific antibodies can also be asymmetric as shown in the following non-limiting examples. Non-limiting example are also depicted in FIG. 6, FIG. 7, and FIG. 8, which illustrate an asymmetric/heterodimer approach. Again, in any of these formats, any of the antibody moieties at any of the four attachment/fusion points can be substituted with a non-antibody moiety, e.g., an effector binding/modulating moiety that does not comprise an antibody molecule. In some embodiments, the dimerization interface centers around the human IgG1 CH2-CH3 domains, which dimerize via a contact interface spanning both CH2/CH2 and CH3/CH3. However, in order to achieve heterodimerization instead of homodimerization of each heavy chain, mutations are introduced in each CH3 domain. The heterodimerizing mutations include T366W mutation (kabat) in one CH3 domain and T366S, L368A, and Y407V (kabat) mutations in the other CH3 domain. The heterodimerizing interface may be further stabilized with de novo disulfide bonds via mutation of native residues to cysteine residues such as S354 and Y349 on opposite sides of the CH3/CH3 interface. The resulting bispecific antibodies shown have a total valence comprised of four binding units. With this approach, the overall molecule can be designed to have bispecificity at just one terminus and monospecificity at the other terminus (trispecificity overall) or bispecificity at either terminus with an overall molecular specificity of 2 or 4. In the illustrative examples below, the C-terminus comprises two identical binding domains which could, for example, provide bivalent monospecificity for a tissue tethering target. At the N-terminus of all three of the illustrative examples, both binding domains comprise different recognition elements/paratopes and which could achieve recognition of two different epitopes on the same effector moiety target, or could recognize for examples a T cell inhibitory receptor and CD3. In some embodiments, the N-terminal binding moieties may be interchanged with other single polypeptide formats such as scFv, single chain Fab, tandem scFv, VH or VHH domain antibody configurations for example. Other types of recognition element may be used also, such as linear or cyclic peptides.

[0098] An example of an asymmetric molecule is depicted in FIG. 6. Referring to FIG. 6, the N-terminus of the molecule is comprised of a first light chain paired with a first heavy chain via VH/VL and Ckappa or Clambda/CH1 interactions and a covalent tether comprised of the native heavy/light chain disulfide bond. On the opposite side of this heterodimeric molecule at the N-terminus is a second light chain and a second heavy chain which are physically conjoined via a linker between the c-terminus of Ckappa or Clambda and the N-terminus of the VH. The linker may be 36-80 amino acids in length and comprised of serine, glycine, alanine and threonine residues. The physically conjoined N-terminal light chains interface with the N-terminal VH-CH1 domains of each heavy chain via the VH/VL interaction and Ckappa or Clambda interaction with CH1. The native disulfide bond between the Ckappa or Clambda with CH1 is present providing additional stability between the light and heavy chains. At the C-terminus of the molecule are two identical soluble VH3 germline family VH domains joined via an N-terminal glycine/serine/alanine/threonine based linker to the C-terminus of the CH3 domain of both heavy chain 1 and heavy chain 2.

[0099] In some embodiments, an asymmetric molecule can be as depicted in FIG. 7. For example, the N-terminus of the molecule is comprised of two different VH3 germlined based soluble VH domains linked to the human IgG1 hinge region via a glycine/serine/alanine/threonine based linker. The VH domain connected to the first heavy chain is different to the VH domain connected to the second heavy chain. At the C-terminus of each heavy chain is an additional soluble VH3 germline based VH domain, which is identical on each of the two heavy chains. The heavy chain heterodimerizes via the previously described knobs into holes mutations present at the CH3 interface of the Fc module.

[0100] In some embodiments, an asymmetric molecule can be as illustrated in FIG. 8. This example is similar to the molecule shown in FIG. 7, except both N-terminal Fab units are configured in a way that light chain 1 and light chain 2 are physically conjoined with heavy chain 1 and heavy chain 2 via a linker between the C-terminus of Ckappa or Clambda and the N-terminus of each respective VH. The linker in each case may be 36-80 amino acids in length and comprised of serine, glycine, alanine and threonine residues. The physically conjoined N-terminal light chains interface with the N-terminal VH-CH1 domains of each heavy chain via the VH/VL interaction and Ckappa or Clambda interaction with CH1. The native disulfide bond between the Ckappa or Clambda with CH1 is present providing additional stability between the light and heavy chains.

[0101] Bi-specific molecules can also have a mixed format. This is illustrated, for example, in FIG. 9, FIG. 10, and FIG. 11.

[0102] For example, FIG. 9 illustrates a homodimer Fc based approach (see FIGS. 3, 4, and 5), combined with the moiety format selection of FIG. 7, whereby the total molecular valency is four, but specificity is restricted to two specificities. The N-terminus is comprised of two identical soluble VH3 germline based VH domains and the C-terminus is comprised of two identical soluble VH3 germlined based VH domains of different specificity to the N-terminal domains. Therefore, each specificity has a valence of two. Again, in this format, any of the antibody moieties at any of the four attachment/fusion points can be substituted with a non-antibody moiety, e.g., an effector binding/modulating moiety that does not comprise an antibody molecule.

[0103] FIG. 10 illustrates another example of a bispecific molecule having a mixed format. In this example, the molecule is comprised of four VH3 germline based soluble VH domains. The first two domains have the same specificity (for example an inhibitory receptor), the 3rd domain from the N-terminus may have specificity for a tissue antigen and the fourth domain from the N-terminus may have specificity for human serum albumin (HSA), thereby granting the molecule extended half-life in the absence of an Ig Fc domain. Three glycine, serine, alanine and/or threonine rich linkers exists between domains 1 and 2, domains 2 and 3, and domains 3 and 4. This format may be configured with up to tetraspecificity, but monovalent in each case, or to have bispecificity with bivalency in each case. The order of domains can be changed. Again, in this format, any of the antibody moieties can be substituted with a non-antibody moiety, e.g., an effector binding/modulating moiety that does not comprise an antibody molecule.

[0104] FIG. 11 illustrates yet another approach. This example is similar to FIGS. 3 and 4, in that it is Fc homodimer based with two identical Fab units (bivalent monospecificity) at the N-terminus of the molecule. This example differs from FIGS. 3A and 4 in that the C-terminus of each heavy chain is appended with a tandem-scFv. Thus, in each case the C-terminus of the CH3 domain of the Fc is linked via a glycine/serine/alanine/threonine based linker to the N-terminus of a first VH domain, which is linked via the C-terminus by a 12-15 amino acid glycine/serine rich linker to the N-terminus of a first VL domain, which linked via a 25-35 amino acid glycine/serine/alanine/threonine based linker at the c-terminus to the N-terminus of a second VH domain, which is linked via the C-terminus with a 12-15 amino acid glycine/serine based linker to the N-terminus of a 2nd VL domain. In this Fc homodimer based molecule there are therefore two identical tandem scFvs at the C-terminus of the molecule offering either tetravalency for a single tissue antigen for example or bivalency to two different molecules. This format could also be adapted with a heterodimer Fc core allowing two different tandem-scFvs at the Cc-terminus of the Fc allowing for monovalent tetraspecificity at the c-terminus while retaining either bivalent monospecificity at the N-terminus or monovalent bispecificity at the N-terminal via usage of single chain Fab configurations as in FIGS. 5, 6, and 7. This molecule can therefore be configured to have 2, 3, 4, 5, or 6 specificities. The domain order of scFvs within the tandem-scFv units may be configured to be from N to C terminus either VH-Linker-VL or VL-Linker-VH. Again, in this format, any of the antibody moieties at any of the four attachment/fusion points can be substituted with a non-antibody moiety, e.g., an effector binding/modulating moiety that does not comprise an antibody molecule.

[0105] Bi-specific antibodies can also be constructed to have, for example, shorter systemic PK while having increased tissue penetration. These types of antibodies can be based upon, for example, a human VH3 based domain antibody format. These are illustrated, for example, in FIGS. 12, 13, and 14. FIGS. 12, 13, and 14 each comprised a soluble VH3 germline family based VH domain modules. Each domain is approximately 12.5 kDa allowing for a small overall MW, which, without being bound to any particular theory, should be beneficial for enhanced tissue penetration. In these examples, none of the VH domains recognize any half-life extending targets such as FcRn or HSA. As illustrated in FIG. 12, the molecule is comprised of two VH domains joined with a flexible hydrophilic glycine/serine based linker between the C-terminus of the first domain and N-terminus of the second domain. In this example one domain may recognize a T cell co-stimulatory receptor and the second may recognize a tissue tethering antigen. As illustrated in FIG. 13, the molecule is comprised of three VH domains with N-C terminal linkages of hydrophilic glycine/serine based linkers. The molecule may be configured to be trispecific but monovalent for each target. It may be bispecific with bivalency for one target and monovalency for another. As illustrated in FIG. 14, the molecule is comprised of four VH domains with N-C terminal Glycine/Serine rich linkers between each domain. This molecule may be configured to be tetraspecific, trispecific, or bispecific with varying antigenic valencies in each case. Again, in this format, any of the antibody moieties at can be substituted with a non-antibody moiety, e.g., an effector binding/modulating moiety that does not comprise an antibody molecule.

[0106] Other embodiments of bi-specific antibodies are illustrated in FIGS. 15 and 16. FIGS. 15 and 16 are comprised of the naturally heterodimerizing core of the human IgG CH1/Ckappa interface, including the c-terminal heavy/light disulfide bond which covalently anchors the interaction. This format does not contain an Fc or any moieties for half-life extension. As illustrated in FIG. 15, the molecule, at the N-terminus of the constant kappa domain is appended with an scFv fragment consisting of an N-terminal VH domain, linked at its C-terminus to the N-terminus of a VL domain via a 12-15 amino acid gly/ser based linker, which is linked by its C-terminus to the N-terminus of the constant kappa domain via the native VL-Ckappa elbow sequence. The CH1 domain is appended at the N-terminus with an scFv fragment consisting of an N-terminal VL domain linked at its c-terminus via a 12-15 amino acid gly/ser linker to the N-terminus of a VH domain, which is linked at its c-terminus to the N-terminus of the CH1 domains via the natural VH-CH1 elbow sequence. As illustrated in FIG. 16, the molecule has the same N-terminal configuration as Example 13. However the C-terminus of the constant kappa and CH1 domains are appended with scFv modules which may be in either the VH-VL or VL-VH configuration and may be either specific for the same antigen or specific for two different antigens. The VH/VL inter-domain linkers may be 12-15 amino acids in length and consisting of gly/ser residues. The scFv binding sub-units may be swapped for soluble VH domains, or peptide recognition elements, or even tandem-scFv elements. This approach can also be configured to use variable lambda and/or constant lambda domains. Again, in this format, any of the antibody moieties at any of the attachment/fusion points can be substituted with a non-antibody moiety, e.g., an effector binding/modulating moiety that does not comprise an antibody molecule.

[0107] FIG. 17 illustrates another embodiment. FIG. 17 represents a tandem scFv format consisting of a first N-terminal VL domain linked at its C-terminus to the N-terminus of a first VH domain with a 12-15 amino acid gly/ser rich linker, followed at the first VH c-terminus by a 25-30 amino acid gly/ser/ala/thr based linker to the N-terminus of a second VL domain. The second VL domain is linked at the C-terminus to the N-terminus of a 2nd VH domain by a 12-15 amino acid gly/ser linker. Each scFv recognizes a different target antigen such as a co-stimulatory T cell molecule and a tissue tethering target. Again, in this format, any of the antibody moieties can be substituted with a non-antibody moiety, e.g., an effector binding/modulating moiety that does not comprise an antibody molecule.

[0108] FIG. 18 illustrates another embodiment. FIG. 18 is a F(ab′)2 scFv fusion. This consists of two identical Fab components joined via two disulfide bonds in the native human IgG1 hinge region c-terminal of the human IgG CH1 domain. The human IgG1 CH2 and CH3 domains are absent. At the c-terminus of heavy chains 1 and 2 are two identical scFv fragments linked via a gly/ser/ala/thr rich linker to the c-terminus of the huIgG1 hinge region. In the configuration shown, the VH is N-terminal in each scFv unit and linked via a 12-15 amino acid gly/ser rich linker to the N-terminus of a VL domain. An alternative configuration is N-term-VL-Linker-VH-C-term. In this design, the construct is bispecific with bivalency for reach target. Again, in this format, any of the antibody moieties at any of the four attachment/fusion points can be substituted with a non-antibody moiety, e.g., an effector binding/modulating moiety that does not comprise an antibody molecule.

[0109] Cell surface molecule binder, as that term is used herein, refers to a molecule, typically a polypeptide, that binds, e.g., specifically, to a cell surface molecule on a cell, e.g., an immunosuppressive immune cell, e.g., a Treg. In some embodiments, the cell surface binder has sufficient sequence from a naturally occurring ligand of the cell surface molecule, that it can specifically bind the cell surface molecule (a cell surface molecule ligand). In some embodiments, the cell surface binding is an antibody molecule that binds, e.g., specifically binds, the cell surface molecule.

[0110] Donor specific targeting moiety, as that term is used herein, refers to a moiety, e.g., an antibody molecule, that as a component of a therapeutic compound, localizes the therapeutic compound preferentially to an implanted donor tissue, as opposed to tissue of a recipient. As a component of a therapeutic compound, the donor specific targeting moiety provides site-specific immune privilege for a transplant tissue, e.g., an organ, from a donor.

[0111] In some embodiments, a donor specific targeting moiety it binds to the product, e.g., a polypeptide product, of an allele present at a locus, which allele is not present at the locus in the (recipient) subject. In some embodiments, a donor specific targeting moiety binds to an epitope on product, which epitope is not present in the (recipient) subject.

[0112] In some embodiments, a donor specific targeting moiety, as a component of a therapeutic compound, preferentially binds to a donor target or antigen, e.g., has a binding affinity for the donor target that is greater for donor antigen or tissue, e.g., at least 2, 4, 5, 10, 50, 100, 500, 1,000, 5,000, or 10,000 fold greater, than its affinity for than for subject antigen or tissue. In some embodiments, a donor specific targeting moiety, has a binding affinity for a product of an allele of a locus present in donor tissue (but not present in the subject) at least 2, 4, 5, 10, 50, 100, 500, 1,000, 5,000, or 10,000 fold greater, than its affinity for the product of the allele of the locus present in the subject (which allele is not present in donor tissue). Affinity of a therapeutic compound of which the donor specific moiety is a component, can be measured in a cell suspension, e.g., the affinity for suspended cells having the allele is compared with its affinity for suspended cells not having the allele. In some embodiments, the binding affinity for the donor allele cells is below 10 nM. In some embodiments, the binding affinity for the donor allele cells is below 100 pM, 50 pM, or 10 pM.

[0113] In some embodiments, the specificity for a product of a donor allele is sufficient that when the donor specific targeting moiety is coupled to an immune-down regulating effector: i) immune attack of the implanted tissue, e.g., as measured by histological inflammatory response, infiltrating T effector cells, or organ function, in the clinical setting—e.g. creatinine for the kidney, is substantially reduced, e.g., as compared to what would be seen in an otherwise similar implant but lacking the donor specific targeting moiety is coupled to an immune-down regulating effector; and/or ii) immune function in the recipient, outside or away from the implanted tissue, is substantially maintained. In some embodiments, one or more of the following is seen: at therapeutic levels of therapeutic compound, peripheral blood lymphocyte counts are not substantially impacted, e.g., the level of T cells is within 25, 50, 75, 85, 90, or 95% of normal, the level of B cells is within 25, 50, 75, 85, 90, or 95% of normal, and/or the level of granuloctyes (PMNs) cells is within 25, 50, 75, 85, 90, or 95% of normal, or the level of monocytes is within 25, 50, 75, 85, 90, or 95% of normal; at therapeutic levels of therapeutic compound, the ex vivo proliferative function of PBMCs (peripheral blood mononuclear cells) against non-disease relevant antigens is substantially normal or is within 70, 80, or 90% of normal; at therapeutic levels of therapeutic compound, the incidence or risk of risk of opportunistic infections and cancers associated with immunosuppression is not substantially increased over normal; or at therapeutic levels of therapeutic compound, the incidence or risk of risk of opportunistic infections and cancers associated with immunosuppression is substantially less than would be seen with standard of care, or non-targeted, immunosuppression. In some embodiments, the donor specific targeting moiety comprises an antibody molecule, a target specific binding polypeptide, or a target ligand binding molecule.

[0114] Elevated risk, as used herein, refers to the risk of a disorder in a subject, wherein the subject has one or more of a medical history of the disorder or a symptom of the disorder, a biomarker associated with the disorder or a symptom of the disorder, or a family history of the disorder or a symptom of the disorder.

[0115] Functional antibody molecule to an effector or inhibitory immune checkpoint molecule, as that term is used herein, refers to an antibody molecule that when present as the ICIM binding/modulating moiety of a multimerized therapeutic compound, can bind and agonize the effector or inhibitory immune checkpoint molecule. In some embodiments, the anti-effector or inhibitory immune checkpoint molecule antibody molecule, when binding as a monomer (or binding when the therapeutic compound is not multimerized), to the effector or inhibitory immune checkpoint molecule, does not antagonize, substantially antagonize, prevent binding, or prevent substantial binding, of an endogenous counter ligand of the inhibitory immune checkpoint molecule to inhibitory immune checkpoint molecule. In some embodiments, the anti-effector or inhibitory immune checkpoint molecule antibody molecule when binding as a monomer (or binding when the therapeutic compound is not multimerized), to the inhibitory immune checkpoint molecule, does not agonize or substantially agonize, the effector or inhibitory molecule.

[0116] ICIM binding/modulating moiety, as that term is used herein, refers to an effector binding/modulating moiety that, as part of a therapeutic compound, binds and agonizes a cell surface inhibitory molecule, e.g., an inhibitory immune checkpoint molecule, e.g., PD-1, or binds or modulates cell signaling, e.g., binds a FCRL, e.g., FCRL1-6, or binds and antagonizes a molecule that promotes immune function.

[0117] IIC binding/modulating moiety, as that term is used herein, refers to an effector binding/modulating moiety that, as part of a therapeutic compound, binds an immunosuppressive immune cell. In some embodiments, the IIC binding/modulating moiety increases the number or concentration of an immunosuppressive immune cell at the binding site.

[0118] ICSM binding/modulating moiety, as that term is used herein, refers to an effector binding/modulating moiety that antagonizes an immune stimulatory effect of a stimulatory, e.g., co-stimulatory, binding pair. A stimulatory or co-stimulatory binding pair, as that term is used herein, comprises two members, 1) a molecule on the surface of an immune cell; and 2) the binding partner for that cell molecule, which may be an additional immune cell, or a non-immune cell. Ordinarily, upon binding of one member to the other, assuming other requirements are met, the member on the immune cell surfaces stimulates the immune cell, e.g., a costimulatory molecule, and an immune response is promoted. In situations where the costimulatory molecule and the costimulatory molecule counterstructure are both expressed on immune cells, bi-directional activation of both cells may occur. In an embodiment an ICSM binding/modulating moiety binds and antagonizes the immune cell expressed member of a binding pair. For example, it binds and antagonizes OX40. In another embodiment, an ICSM binding/modulating moiety binds and antagonizes the member of the binding pair that itself binds the immune cell expressed member, e.g., it binds and antagonizes OX40L. In either case, inhibition of stimulation or co-stimulation of an immune cell is achieved. In an embodiment the ICSM binding/modulating moiety decreases the number or the activity of an immunostimulating immune cell at the binding site.

### Inhibitory Immune Checkpoint Molecules

[0119] An “inhibitory immune checkpoint molecule ligand molecule,” as that term is used herein, refers to a polypeptide having sufficient inhibitory immune checkpoint molecule ligand sequence, e.g., in the case of a PD-L1 molecule, sufficient PD-L1 sequence, that when present as an ICIM binding/modulating moiety of a multimerized therapeutic compound, can bind and agonize its cognate inhibitory immune checkpoint molecule, e.g., again in the case of a PD-L1 molecule, PD-1.

[0120] In some embodiments, the inhibitory immune checkpoint molecule ligand molecule, e.g., a PD-L1 molecule, when binding as a monomer (or binding when the therapeutic compound is not multimerized), to its cognate ligand, e.g., PD-1, does not antagonize or substantially antagonize, or prevent binding, or prevent substantial binding, of an endogenous inhibitory immune checkpoint molecule ligand to the inhibitory immune checkpoint molecule. E.g., in the case of a PD-L1 molecule, the PD-L1 molecule does not antagonize binding of endogenous PD-L1 to PD-1.

[0121] In some embodiments, the inhibitory immune checkpoint molecule ligand when binding as a monomer, to its cognate inhibitory immune checkpoint molecule does not agonize or substantially agonize the inhibitory immune checkpoint molecule. By way of example, e.g., a PD-L1 molecule when binding to PD-1, does not agonize or substantially agonize PD-1.

[0122] In some embodiments, an inhibitory immune checkpoint molecule ligand molecule has at least 60, 70, 80, 90, 95, 99, or 100% sequence identity, or substantial sequence identity, with a naturally occurring inhibitory immune checkpoint molecule ligand.

[0123] Exemplary inhibitory immune checkpoint molecule ligand molecules include: a PD-L1 molecule, which binds to inhibitory immune checkpoint molecule PD-1, and in embodiments has at least 60, 70, 80, 90, 95, 99, or 100% sequence identity, or substantial sequence identity, with a naturally occurring PD-L1, e.g., the PD-L1 molecule comprising the sequence of

(SEQ ID NO: 3)
MRIFAVFIFMTYWHLLNAFTVTVPKDLYVVEYGSNMTIECKFPVEKQLDL
AALIVYWEMEDKNIIQFVHGEEDLKVQHSSYRQRARLLKDQLSLGNAALQ
ITDVKLQDAGVYRCMISYGGADYKRITVKVNAPYNKINQRILVVDPVTSE
HELTCQAEGYPKAEVIWTSSDHQVLSGKTTTTNSKREEKLFNVTSTLRIN
TTTNEIFYCTFRRLDPEENHTAELVIPELPLAHPPNERTHLVILGAILLC
LGVALTFIFRLRKGRMMDVKKCGIQDTNSKKQSDTHLEET,

or an active fragment thereof; in some embodiments, the active fragment comprises residues 19 to 290 of the PD-L1 sequence; an HLA-G molecule, which binds to any of inhibitory immune checkpoint molecules KIR2DL4, LILRB1, and LILRB2, and in embodiments has at least 60, 70, 80, 90, 95, 99, or 100% sequence identity, or substantial sequence identity, with a naturally occurring HLA-G. Exemplary HLA-G sequences include, e.g., a mature form found in the sequence at GenBank P17693.1 RecName: Full=HLA class I histocompatibility antigen, alpha chain G; AltName: Full=HLA G antigen; AltName: Full=MHC class I antigen G; Flags: Precursor, or in the sequence

(SEQ ID NO: 4)
MVVMAPRTLFLLLSGALTLTETWAGSHSMRYFSAAVSRPGRGEPRFIAMG
YVDDTQFVRFDSDSACPRMEPRAPWVEQEGPEYWEEETRNTKAHAQTDRM
NLQTLRGYYNQSEASSHTLQWMIGCDLGSDGRLLRGYEQYAYDGKDYLAL
NEDLRSWTAADTAAQISKRKCEAANVAEQRRAYLEGTCVEWLHRYLENGK
EMLQRADPPKTHVTHHPVFDYEATLRCWALGFYPAEIILTWQRDGEDQTQ
DVELVETRPAGDGTFQKWAAVVVPSGEEQRYTCHVQHEGLPEPLMLRWKQ
SSLPTIPIMGIVA.

[0124] Inhibitory molecule counter ligand molecule, as that term is used herein, refers to a polypeptide having sufficient inhibitory molecule counter ligand sequence such that when present as the ICIM binding/modulating moiety of a multimerized therapeutic compound, can bind and agonize a cognate inhibitory molecule. In some embodiments, the inhibitory molecule counter ligand molecule, when binding as a monomer (or binding when the therapeutic compound is not multimerized), to the inhibitory molecule, does not antagonize, substantially antagonize, prevent binding, or prevent substantial binding, of an endogenous counter ligand of the inhibitory molecule to the inhibitory molecule. In some embodiments, the inhibitory molecule counter ligand molecule when binding as a monomer (or binding when the therapeutic compound is not multimerized), to the inhibitory molecule, does not agonize or substantially agonize, the inhibitory molecule.

[0125] Sequence identity, percentage identity, and related terms, as those terms are used herein, refer to the relatedness of two sequences, e.g., two nucleic acid sequences or two amino acid or polypeptide sequences. In the context of an amino acid sequence, the term “substantially identical” is used herein to refer to a first amino acid that contains a sufficient or minimum number of amino acid residues that are i) identical to, or ii) conservative substitutions of aligned amino acid residues in a second amino acid sequence such that the first and second amino acid sequences can have a common structural domain and/or common functional activity. For example, amino acid sequences that contain a common structural domain having at least about 85%, 90%. 91%, 92%, 93%, 94%, 95%, 96%, 97%, 98% or 99% identity to a reference sequence, e.g., a sequence provided herein.

[0126] In the context of nucleotide sequence, the term “substantially identical” is used herein to refer to a first nucleic acid sequence that contains a sufficient or minimum number of nucleotides that are identical to aligned nucleotides in a second nucleic acid sequence such that the first and second nucleotide sequences encode a polypeptide having common functional activity, or encode a common structural polypeptide domain or a common functional polypeptide activity. For example, nucleotide sequences having at least about 85%, 90%, 91%, 92%, 93%, 94%, 95%, 96%, 97%, 98% or 99% identity to a reference sequence, e.g., a sequence provided herein.

[0127] The term “functional variant” refers to polypeptides that have a substantially identical amino acid sequence to the naturally-occurring sequence, or are encoded by a substantially identical nucleotide sequence, and are capable of having one or more activities of the naturally-occurring sequence.

[0128] Calculations of homology or sequence identity between sequences (the terms are used interchangeably herein) are performed as follows.

[0129] To determine the percent identity of two amino acid sequences, or of two nucleic acid sequences, the sequences are aligned for optimal comparison purposes (e.g., gaps can be introduced in one or both of a first and a second amino acid or nucleic acid sequence for optimal alignment and non-homologous sequences can be disregarded for comparison purposes). In a preferred embodiment, the length of a reference sequence aligned for comparison purposes is at least 30%, preferably at least 40%, more preferably at least 50%, 60%, and even more preferably at least 70%, 80%, 90%, 100% of the length of the reference sequence. The amino acid residues or nucleotides at corresponding amino acid positions or nucleotide positions are then compared. When a position in the first sequence is occupied by the same amino acid residue or nucleotide as the corresponding position in the second sequence, then the molecules are identical at that position (as used herein amino acid or nucleic acid “identity” is equivalent to amino acid or nucleic acid “homology”).

[0130] The percent identity between the two sequences is a function of the number of identical positions shared by the sequences, taking into account the number of gaps, and the length of each gap, which need to be introduced for optimal alignment of the two sequences.

[0131] The comparison of sequences and determination of percent identity between two sequences can be accomplished using a mathematical algorithm. In a preferred embodiment, the percent identity between two amino acid sequences is determined using the Needleman and Wunsch ((1970) J. Mol. Biol. 48:444-453) algorithm which has been incorporated into the GAP program in the GCG software package (available at http://www.gcg.com), using either a Blossum 62 matrix or a PAM250 matrix, and a gap weight of 16, 14, 12, 10, 8, 6, or 4 and a length weight of 1, 2, 3, 4, 5, or 6. In yet another preferred embodiment, the percent identity between two nucleotide sequences is determined using the GAP program in the GCG software package (available at http://www.gcg.com), using a NWSgapdna.CMP matrix and a gap weight of 40, 50, 60, 70, or 80 and a length weight of 1, 2, 3, 4, 5, or 6. A particularly preferred set of parameters (and the one that should be used unless otherwise specified) are a Blossum 62 scoring matrix with a gap penalty of 12, a gap extend penalty of 4, and a frameshift gap penalty of 5.

[0132] The percent identity between two amino acid or nucleotide sequences can be determined using the algorithm of E. Meyers and W. Miller ((1989) CABIOS, 4:11-17) which has been incorporated into the ALIGN program (version 2.0), using a PAM120 weight residue table, a gap length penalty of 12 and a gap penalty of 4.

[0133] The nucleic acid and protein sequences described herein can be used as a “query sequence” to perform a search against public databases to, for example, identify other family members or related sequences. Such searches can be performed using the NBLAST and XBLAST programs (version 2.0) of Altschul, et al. (1990) J. Mol. Biol. 215:403-10. BLAST nucleotide searches can be performed with the NBLAST program, score=100, wordlength=12 to obtain nucleotide sequences homologous to for example any a nucleic acid sequence provided herein. BLAST protein searches can be performed with the XBLAST program, score=50, wordlength=3 to obtain amino acid sequences homologous to protein molecules provided herein. To obtain gapped alignments for comparison purposes, Gapped BLAST can be utilized as described in Altschul et al., (1997) Nucleic Acids Res. 25:3389-3402. When utilizing BLAST and Gapped BLAST programs, the default parameters of the respective programs (e.g., XBLAST and NBLAST) can be used. See http://www.ncbi.nlm.nih.gov.

As used herein, the term “hybridizes under low stringency, medium stringency, high stringency, or very high stringency conditions” describes conditions for hybridization and washing. Guidance for performing hybridization reactions can be found in Current Protocols in Molecular Biology, John Wiley & Sons, N.Y. (1989), 6.3.1-6.3.6, which is incorporated by reference. Aqueous and nonaqueous methods are described in that reference and either can be used. Specific hybridization conditions referred to herein are as follows: 1) low stringency hybridization conditions in 6× sodium chloride/sodium citrate (SSC) at about 45° C., followed by two washes in 0.2×SSC, 0.1% SDS at least at 50° C. (the temperature of the washes can be increased to 55° C. for low stringency conditions); 2) medium stringency hybridization conditions in 6×SSC at about 45° C., followed by one or more washes in 0.2×SSC, 0.1% SDS at 60° C.; 3) high stringency hybridization conditions in 6×SSC at about 45° C., followed by one or more washes in 0.2×SSC, 0.1% SDS at 65° C.; and preferably 4) very high stringency hybridization conditions are 0.5M sodium phosphate, 7% SDS at 65° C., followed by one or more washes at 0.2×SSC, 1% SDS at 65° C. Very high stringency conditions (4) are the preferred conditions and the ones that should be used unless otherwise specified.

[0134] It is understood that the molecules and compounds of the present embodiments may have additional conservative or non-essential amino acid substitutions, which do not have a substantial effect on their functions.

[0135] The term “amino acid” is intended to embrace all molecules, whether natural or synthetic, which include both an amino functionality and an acid functionality and capable of being included in a polymer of naturally-occurring amino acids. Exemplary amino acids include naturally-occurring amino acids; analogs, derivatives and congeners thereof; amino acid analogs having variant side chains; and all stereoisomers of any of any of the foregoing. As used herein the term “amino acid” includes both the D- or L-optical isomers and peptidomimetics. A “conservative amino acid substitution” is one in which the amino acid residue is replaced with an amino acid residue having a similar side chain. Families of amino acid residues having similar side chains have been defined in the art. These families include amino acids with basic side chains (e.g., lysine, arginine, histidine), acidic side chains (e.g., aspartic acid, glutamic acid), uncharged polar side chains (e.g., glycine, asparagine, glutamine, serine, threonine, tyrosine, cysteine), nonpolar side chains (e.g., alanine, valine, leucine, isoleucine, proline, phenylalanine, methionine, tryptophan), beta-branched side chains (e.g., threonine, valine, isoleucine) and aromatic side chains (e.g., tyrosine, phenylalanine, tryptophan, histidine). CD39 molecule, a CD73 molecule, a Cell surface molecule binder, Donor specific targeting moiety Effector ligand binding molecule, ICIM binding/modulating moiety IIC binding/modulating moiety, an inhibitory immune checkpoint molecule ligand molecule, Inhibitory molecule counter ligand molecule, SM binding/modulating moiety, or ICSM binding/modulating moiety.

[0136] SM binding/modulating moiety, as that term is used herein, refers to an effector binding/modulating moiety that, as part of a therapeutic compound, promotes an immunosuppressive local microenvironment, e.g., by providing in the proximity of the target, a substance that inhibits or minimizes attack by the immune system of the target. In some embodiments, the SM binding/modulating moiety comprises, or binds, a molecule that inhibits or minimizes attack by the immune system of the target. In some embodiments, a therapeutic compound comprises an SM binding/modulating moiety that binds and accumulates a soluble substance, e.g., an endogenous or exogenous substance, having immunosuppressive function. In some embodiments, a therapeutic compound comprises an SM binding/modulating moiety that binds and inhibits, sequesters, degrades or otherwise neutralizes a substance, e.g., a soluble substance, typically and endogenous soluble substance, that promotes immune attack. In some embodiments, a therapeutic compound comprises an SM binding/modulating moiety that comprises an immune-suppressive substance, e.g. a fragment of protein known to be immunosuppressive. By way of example, an effector molecule binding moiety that binds, or comprises, a substance e.g., a CD39 molecule or a CD73 molecule, that depletes a component, that promotes immune effector cell function, e.g., ATP or AMP.

[0137] Specific targeting moiety, as that term is used herein, refers to donor specific targeting moiety or a tissue specific targeting moiety.

[0138] Subject, as that term is used herein, refers to a mammalian subject, e.g., a human subject. In some embodiments, the subject is a non-human mammal, e.g., a horse, dog, cat, cow, goat, or pig.

[0139] Target ligand binding molecule, as used herein, refers to a polypeptide that has sufficient sequence from a naturally occurring counter-ligand of a target ligand that it can bind the target ligand on a target tissue (e.g., donor tissue or subject target tissue) with sufficient specificity that it can serve as a specific targeting moiety. In some embodiments, it binds to target tissue or cells with at least 10, 20, 30, 40, 50, 60, 70, 80, 90, or 95% of the affinity of the naturally occurring counter-ligand. In some embodiments, it has at least 60, 70, 80, 90, 95, 99, or 100% sequence identity, or substantial sequence identity, with a naturally occurring counter-ligand for the target ligand.

[0140] Target site, as that term is used herein, refers to a site which contains the entity, e.g., epitope, bound by a targeting moiety. In some embodiments, the target site is the site at which immune privilege is established.

[0141] Tissue specific targeting moiety, as that term is used herein, refers to a moiety, e.g., an antibody molecule, that as a component of a therapeutic molecule, localizes the therapeutic molecule preferentially to a target tissue, as opposed to other tissue of a subject. As a component of a therapeutic compound, the tissue specific targeting moiety provides site-specific immune privilege for a target tissue, e.g., an organ or tissue undergoing or at risk for autoimmune attack. In some embodiments, a tissue specific targeting moiety binds to a product, e.g., a polypeptide product, which is not present outside the target tissue, or is present at sufficiently low levels that, at therapeutic concentrations of therapeutic molecule, unacceptable levels of immune suppression are absent or substantially absent. In some embodiments, a tissue specific targeting moiety binds to an epitope, which epitope is not present outside, or not substantially present outside, the target site.

[0142] In some embodiments, a tissue specific targeting moiety, as a component of a therapeutic compound, preferentially binds to a target tissue or target tissue antigen, e.g., has a binding affinity for the target tissue or antigen that is greater for target antigen or tissue, e.g., at least 2, 4, 5, 10, 50, 100, 500, 1,000, 5,000, or 10,000 fold greater, than its affinity for than for non-target tissue or antigen present outside the target tissue. Affinity of a therapeutic compound of which the tissue specific moiety is a component, can be measured in a cell suspension, e.g., the affinity for suspended cells having the target antigen is compared with its affinity for suspended cells not having the target antigen. In some embodiments, the binding affinity for the target antigen bearing cells is below 10 nM.

[0143] In some embodiments, the binding affinity for the target antigen bearing cells is below 100 pM, 50 pM, or 10 pM. In some embodiments, the specificity for a target antigen is sufficient, that when the tissue specific targeting moiety is coupled to an immune-down regulating effector: i) immune attack of the target tissue, e.g., as measured by histological inflammatory response, infiltrating T effector cells, or organ function, in the clinical setting—e.g. creatinine for kidney, is substantially reduced, e.g., as compared to what would be seen in an otherwise similar implant but lacking the tissue specific targeting moiety is coupled to an immune-down regulating effector; and/or ii) immune function in the recipient, outside or away from the target tissue, is substantially maintained.

[0144] In some embodiments, one or more of the following is seen: at therapeutic levels of therapeutic compound, peripheral blood lymphocyte counts are not substantially impacted, e.g., the level of T cells is within 25, 50, 75, 85, 90, or 95% of normal, the level of B cells is within 25, 50, 75, 85, 90, or 95% of normal, and/or the level of granulocytes (PMNs) cells is within 25, 50, 75, 85, 90, or 95% of normal, or the level of monocytes is within 25, 50, 75, 85, 90, or 95% of normal 1; at therapeutic levels of therapeutic compound, the ex vivo proliferative function of PBMCs (peripheral blood mononuclear cells) against non-disease relevant antigens is substantially normal or is within 70, 80, or 90% of normal; at therapeutic levels of therapeutic compound, the incidence or risk of risk of opportunistic infections and cancers associated with immunosuppression is not substantially increased over normal; or at therapeutic levels of therapeutic compound, the incidence or risk of risk of opportunistic infections and cancers associated with immunosuppression is substantially less than would be seen with standard of care, or non-targeted, immunosuppression. In some embodiments, the tissue specific targeting moiety comprises an antibody molecule. In some embodiments, the donor specific targeting moiety comprises an antibody molecule, a target specific binding polypeptide, or a target ligand binding molecule. In some embodiments, the tissue specific targeting moiety binds a product, or a site on a product, that is present or expressed exclusively, or substantially exclusively, on target tissue.

ICIM Binding/Modulating Moieties: Effector Binding/Modulating Moieties that Bind Inhibitory Receptors

[0145] Methods and compounds described herein provide for a therapeutic compound having an effector binding/modulating moiety comprising an ICIM binding/modulating moiety, that directly binds and activates an inhibitory receptor on the surface of an immune cell, e.g., to reduce or eliminate, or substantially eliminate, the ability of the immune cell to mediate immune attack. Coupling of the ICIM binding/modulating moiety to a targeting entity, promotes site-specific or local down regulation of the immune cell response, e.g., confined substantially to the locations having binding sites for the targeting moiety. Thus, normal systemic immune function is substantially retained. In some embodiments, an ICIM binding/modulating moiety comprises an inhibitory immune checkpoint molecule counter ligand molecule, e.g., a natural ligand, or fragment of a natural ligand (e.g., PD-L1 or HLA-G) of the inhibitory immune checkpoint molecule. In some embodiments, an ICIM binding/modulating moiety comprises a functional antibody molecule, e.g., a functional antibody molecule comprising an scFv binding domain, that engages inhibitory immune checkpoint molecule.

[0146] In some embodiments, the ICIM binding/modulating moiety, comprising, e.g., a functional antibody molecule, or inhibitory immune checkpoint molecule ligand molecule, binds the inhibitory receptor but does not prevent binding of a natural ligand of the inhibitory receptor to the inhibitory receptor. In embodiments a format is used wherein a targeting moiety is coupled, e.g., fused, to an ICIM binding/modulating moiety, comprising, e.g., an scFv domain, and configured so that upon binding of an inhibitory receptor while in solution (e.g., in blood or lymph) (and presumably in a monomeric format), the therapeutic molecule: i) fails to agonize, or fails to substantially agonize (e.g., agonizes at less than 30, 20, 15, 10, or 5% of the level seen with a full agonizing molecule) the inhibitory receptor on the immune cell; and/or ii) fails to antagonize, or fails to substantially antagonize (e.g., antagonizes at less than 30, 20, 15, 10, or 5% of the level seen with a full antagonizing molecule) the inhibitory receptor on the immune cell. A candidate molecule can be evaluated for its ability to agonize or not agonize by its ability to either increase or decrease the immune response in an in vitro cell based assay wherein the target is not expressed, e.g., using an MLR-based assay (mixed lymphocyte reaction).

[0147] In some embodiments, candidate ICIM binding/modulating moieties can reduce, completely or substantially eliminate systemic immunosuppression and systemic immune activation. In some embodiments, the targeting domain of the therapeutic compound, when bound to target, will serve to cluster or multimerize the therapeutic compound on the surface of the tissue desiring immune protection. In some embodiments, the ICIM binding/modulating moiety, e.g., an ICIM binding/modulating moiety comprising a scFv domain, requires a clustered or multimeric state to be able to deliver an agonistic and immunosuppressive signal, or substantial levels of such signal, to local immune cells. This type of therapeutic can, for example, provide to a local immune suppression whilst leaving the systemic immune system unperturbed or substantially unperturbed. That is, the immune suppression is localized to where the suppression is needed as opposed to being systemic and not localized to a particular area or tissue type.

[0148] In some embodiments, upon binding to the target e.g., a target organ, tissue or cell type, the therapeutic compound coats the target, e.g., target organ, tissue or cell type. When circulating lymphocytes attempt to engage and destroy the target, this therapeutic will provide an ‘off’ signal only at, or to a greater extent at, the site of therapeutic compound accumulation.

[0149] A candidate therapeutic compound can be evaluated for the ability to bind, e.g., specifically bind, its target, e.g., by ELISA, a cell based assay, or surface plasmon resonance. This property should generally be maximized, as it mediates the site-specificity and local nature of the immune privilege. A candidate therapeutic compound can be evaluated for the ability to down regulate an immune cell when bound to target, e.g., by a cell based activity assay. This property should generally be maximized, as it mediates the site-specificity and local nature of the immune privilege. The level of down regulation effected by a candidate therapeutic compound in monomeric (or non-bound) form can be evaluated, e.g., by a cell based activity assay. This property should generally be minimized, as could mediate systemic down regulation of the immune system. The level of antagonism of a cell surface inhibitory molecule, e.g., an inhibitory immune checkpoint molecule, effected by a candidate therapeutic compound in monomeric (or non-bound) form can be evaluated, e.g., by, e.g., by a cell based activity assay. This property should generally be minimized, as could mediate systemic unwanted activation of the immune system. Generally, the properties should be selected and balanced to produce a sufficiently robust site specific immune privilege without unacceptable levels of non-site specific agonism or antagonism of the inhibitory immune checkpoint molecule.

### The PD-L1/PD-1 Pathway

[0150] As provided for herein, in some embodiments, the effector molecule is a PD-1 binding moiety, such as a PD-1 agonist. Programmed cell death protein 1, (often referred to as PD-1) is a cell surface receptor that belongs to the immunoglobulin superfamily. PD-1 is expressed on T cells and other cell types including, but not limited to, B cells, myeloid cells, dendritic cells, monocytes, T regulatory cells, iNK T cells. PD-1 binds two ligands, PD-L1 and PD-L2, and is an inhibitory immune checkpoint molecule. Engagement with a cognate ligand, PD-L1 or PD-L2, in the context of engagement of antigen loaded MCH with the T Cell Receptor on a T cell minimizes or prevents the activation and function of T cells. The inhibitory effect of PD-1 can include both promoting apoptosis (programmed cell death) in antigen specific T-cells in lymph nodes and reducing apoptosis in regulatory T cells (suppressor T cells).

[0151] In some embodiments, a therapeutic compound comprises an ICIM binding/modulating moiety which agonizes PD-1 inhibition. An ICIM binding/modulating moiety can include an inhibitory molecule counter ligand molecule, e.g., comprising a fragment of a ligand of PD-1 (e.g., a fragment of PD-L1 or PD-L2) or another moiety, e.g., a functional antibody molecule, comprising, e.g., an scFv domain that binds PD-1.

[0152] In some embodiments, a therapeutic compound comprises a targeting moiety that preferentially binds a donor antigen not present in, or present in substantially lower levels in the subject, e.g., a donor antigen from Table 2, and is localized to donor graft tissue in a subject. In some embodiments, it does not bind, or does not substantially bind, other tissues. In some embodiments, a therapeutic compound can include a targeting moiety that is specific for HLA-A2 and specifically binds donor allograft tissue but does not bind, or does not substantially bind, host tissues. In some embodiments, the therapeutic compound comprises an ICIM binding/modulating moiety, e.g., an inhibitory molecule counter ligand molecule, e.g., comprising a fragment of a ligand of PD-1 (e.g., a fragment of PD-L1 or PD-L2) or another moiety, e.g., a functional antibody molecule, comprising, e.g., an scFv domain that binds PD-1, such that the therapeutic compound, e.g., when bound to target, activates PD-1. The therapeutic compound targets an allograft and provides local immune privilege to the allograft.

[0153] In some embodiments, a therapeutic compound comprises a targeting moiety that is preferentially binds to an antigen of Table 3, and is localized to the target in a subject, e.g., a subject having an autoimmune disorder, e.g., an autoimmune disorder of Table 3. In some embodiments, it does not bind, or does not substantially bind, other tissues. In some embodiments, the therapeutic compound comprises an ICIM binding/modulating moiety, e.g., an inhibitory molecule counter ligand molecule, e.g., comprising a fragment of a ligand of PD-1 (e.g., a fragment of PD-L1 or PD-L2) or another moiety, e.g., a functional antibody molecule, comprising, e.g., an scFv domain that binds PD-1, such that the therapeutic compound, e.g., when bound to target, activates PD-1. The therapeutic compound targets a tissue subject to autoimmune attack and provides local immune privilege to the tissue.

[0154] PD-L1 and PDL2, or polypeptides derived therefrom, can provide candidate ICIM binding moieties. However, in monomer form, e.g., when the therapeutic compound is circulating in blood or lymph, this molecule could have an undesired effect of antagonizing the PD-L1/PD-1 pathway, and may only agonize the PD-1 pathway when clustered or multimerized on the surface of a target, e.g., a target organ. In some embodiments, a therapeutic compound comprises an ICIM binding/modulating moiety comprising a functional antibody molecule, e.g., a scFv domain, that is inert, or substantially inert, to the PD-1 pathway in a soluble form but which agonizes and drives an inhibitory signal when multimerized (by the targeting moiety) on the surface of a tissue.

IIC Binding/Modulating Moieties: Effector Binding/Modulating Moieties that Recruit Immunosuppressive T Cells

[0155] In some embodiments, the composition or therapeutic compound that can be used, for example, to treat Type 1 Diabetes (T1D) comprises an effector binding/modulating moiety, e.g., an IIC binding/modulating moiety, that binds, activates, or retains immunosuppressive cells, e.g., immunosuppressive T cells, at the site mediated by the targeting moiety, providing site-specific immune privilege. The IIC binding/modulating moiety, e.g., an IIC binding/modulating moiety comprising an antibody molecule, comprising, e.g., an scFv binding domain, binds immunosuppressive cell types, e.g., Tregs, e.g., Foxp3+CD25+ Tregs. Organ, tissue or specific cell type tolerance is associated with an overwhelming increase of Tregs proximal and infiltrating the target organ; in embodiments, the methods and compounds described herein synthetically re-create and mimic this physiological state. Upon accumulation of Tregs, an immunosuppressive microenvironment is created that serves to protect the organ of interest from the immune system.

IL-2 Mutein Molecules: IL2 Receptor Binders that Activate Tregs

[0156] In some embodiments, the effector molecule is an IL-2 mutein molecule. As that term is used herein, refers to an IL2 variant that binds with high affinity to the CD25 (IL-2R alpha chain) and with low affinity to the other IL-2R signaling components CD122 (IL-2R beta) and CD132 (IL-2R gamma). Such an IL-2 mutein molecule preferentially activates Treg cells. In embodiments, either alone, or as a component of a therapeutic compound, an IL-2 mutein activates Tregs at least 2, 5, 10, or 100 fold more than cytotoxic or effector T cells. Exemplary IL-2 mutein molecules are described in WO2010085495, WO2016/164937, US2014/0286898A1, WO2014153111A2, WO2010/085495, cytotoxic WO2016014428A2, WO2016025385A1, and US20060269515. Muteins disclosed in these references that include additional domains, e.g., an Fc domain, or other domain for extension of half-life can be used in the therapeutic compounds and methods described herein without such additional domains. In another embodiment an IIC binding/modulating moiety comprises an IL-2 mutein, or active fragment thereof, coupled, e.g., fused, to another polypeptide, e.g., a polypeptide that extends in vivo half-life, e.g., an immunoglobulin constant region, or a multimer or dimer thereof, e.g., AMG 592. In an embodiment the therapeutic compound comprises the IL-2 portion of AMG 592. In an embodiment the therapeutic compound comprises the IL-2 portion but not the immunoglobulin portion of AMG 592. In some embodiments, the mutein does not comprise a Fc region. For some IL-2 muteins, the muteins are engineered to contain a Fc region because such region has been shown to increase the half-life of the mutein. In some embodiments, the extended half-life is not necessary for the methods described and embodied herein. In some embodiments, the Fc region that is fused with the IL-2 mutein comprises a N297 mutations, such as, but not limited to, N297A. In some embodiments, the Fc region that is fused with the IL-2 mutein does not comprise a N297 mutation, such as, but not limited to, N297A.

[0157] Although examples may be provided herein that demonstrate the use of a MAdCAM-PD-1 bispecific to treat Type 1 diabetes, the PD-1 agonist may be replaced with an IL-2 mutein. IL-2 mutein molecules that preferentially expand or stimulate Treg cells (over cytotoxic T cells) can be also used as an IIC binding/modulating moiety.

[0158] In some embodiments, IIC binding/modulating moiety comprises an IL-2 mutein molecule. As used herein, the term “IL-2 mutein molecule” or “IL-2 mutein” refers to an IL-2 variant that preferentially activates Treg cells. In some embodiments, either alone, or as a component of a therapeutic compound, an IL-2 mutein molecule activates Tregs at least 2, 5, 10, or 100 fold more than cytotoxic T cells. A suitable assay for evaluating preferential activation of Treg cells can be found in U.S. Pat. No. 9,580,486 at, for example, Examples 2 and 3, or in WO2016014428 at, for example, Examples 3, 4, and 5, each of which is incorporated by reference in its entirety. The sequence of mature IL-2 is

(SEQ ID NO: 6)
APTSSSTKKTQLQLEHLLLDLQMILNGINNYKNPKLTRMLTFKF
YMPKKATELKHLQCLEEELKPLEEVLNLAQSKNFHLRPRDLISN
INVIVLELKGSETTFMCEYADETATIVEFLNRWITFCQSIISTL
T (mature IL-2 sequence).

[0159] The immature sequence of IL-2 can be represented by

(SEQ ID NO: 15)
MYRMQLLSCIALSLALVTNSAPTSSSTKKTQLQLEHLLLDLQMI
LNGINNYKNPKLTRMLTFKFYMPKKATELKHLQCLEEELKPLEE
VLNLAQSKNFHLRPRDLISNINVIVLELKGSETTFMCEYADETA
TIVEFLNRWITFCQSIISTLT.

[0160] In some embodiments, an IIC binding/modulating moiety comprises an IL-2 mutein, or active fragment thereof, coupled, e.g., fused, to another polypeptide, e.g., a polypeptide that extends in vivo half-life, e.g., an immunoglobulin constant region, or a multimer or dimer thereof.

[0161] An IL-2 mutein molecule can be prepared by mutating one or more of the residues of IL-2. Non-limiting examples of IL-2-muteins can be found in WO2016/164937, U.S. Pat. Nos. 9,580,486, 7,105,653, 9,616,105, 9,428,567, US2017/0051029, US2014/0286898A1, WO2014153111A2, WO2010/085495, WO2016014428A2, WO2016025385A1, and US20060269515, each of which are incorporated by reference in its entirety.

[0162] In some embodiments, the alanine at position 1 of the sequence above is deleted. In some embodiments, the IL-2 mutein molecule comprises a serine substituted for cysteine at position 125 of the mature IL-2 sequence. Other combinations of mutations and substitutions that are IL-2 mutein molecules are described in US20060269515, which is incorporated by reference in its entirety. In some embodiments, the cysteine at position 125 is also substituted with a valine or alanine. In some embodiments, the IL-2 mutein molecule comprises a V91K substitution. In some embodiments, the IL-2 mutein molecule comprises a N88D substitution. In some embodiments, the IL-2 mutein molecule comprises a N88R substitution. In some embodiments, the IL-2 mutein molecule comprises a substitution of H16E, D84K, V91N, N88D, V91K, or V91R, any combinations thereof. In some embodiments, these IL-2 mutein molecules also comprise a substitution at position 125 as described herein. In some embodiments, the IL-2 mutein molecule comprises one or more substitutions selected from the group consisting of: T3N, T3A, L12G, L12K, L12Q, L12S, Q13G, E15A, E15G, E15S, H16A, H16D, H16G, H16K, H16M, H16N, H16R, H16S, H16T, H16V, H16Y, L19A, L19D, L19E, L19G, L19N, L19R, L19S, L19T, L19V, D20A, D20E, D20H, D20I, D20Y, D20F, D20G, D20T, D20W, M23R, R81A, R81G, R81S, R81T, D84A, D84E, D84G, D84I, D84M, D84Q D84R, D84S, D84T, S87R, N88A, N88D, N88E, N88I, N88F, N88G, N88M, N88R, N88S, N88V, N88W, V91D, V91E, V91G, V91S, I92K, I92R, E95G, and Q126. In some embodiments, the amino acid sequence of the IL-2 mutein molecule differs from the amino acid sequence set forth in mature IL-2 sequence with a C125A or C125S substitution and with one substitution selected from T3N, T3A, L12G, L12K, L12Q L12S, Q13G, E15A, E15G, E15S, H16A, H16D, H16G, H16K, H16M, H16N, H16R, H16S, H16T, H16V, H16Y, L19A, L19D, L19E, L19G, L19N, L19R, L19S, L19T, L19V, D20A, D20E, D20F, D20G, D20T, D20W, M23R, R81A, R81G, R81S, R81T, D84A, D84E, D84G, D84I, D84M, D84Q, D84R, D84S, D84T, S87R, N88A, N88D, N88E, N88F, N88I, N88G, N88M, N88R, N88S, N88V, N88W, V91D, V91E, V91G, V91S, I92K, I92R, E95G, Q126I, Q126L, and Q126F. In some embodiments, the IL-2 mutein molecule differs from the amino acid sequence set forth in mature IL-2 sequence with a C125A or C125S substitution and with one substitution selected from D20H, D20I, D20Y, D20E, D20G, D20W, D84A, D84S, H16D, H16G, H16K, H16R, H16T, H16V, I92K, I92R, L12K, L19D, L19N, L19T, N88D, N88R, N88S, V91D, V91G, V91K, and V91S. In some embodiments, the IL-2 mutein comprises N88R and/or D20H mutations.

[0163] In some embodiments, the IL-2 mutein molecule comprises a mutation in the polypeptide sequence at a position selected from the group consisting of amino acid 30, amino acid 31, amino acid 35, amino acid 69, and amino acid 74. In some embodiments, the mutation at position 30 is N30S. In some embodiments, the mutation at position 31 is Y311H. In some embodiments, the mutation at position 35 is K35R. In some embodiments, the mutation at position 69 is V69A. In some embodiments, the mutation at position 74 is Q74P. In some embodiments, the mutein comprises a V69A mutation, a Q74P mutation, a N88D or N88R mutation, and one or more of L53I, L56I, L80I, or L118I mutations. In some embodiments, the mutein comprises a V69A mutation, a Q74P mutation, a N88D or N88R mutation, and a L to I mutation selected from the group consisting of L53I, L56I, L80I, and L118I mutation. In some embodiments, the IL-2 mutein comprises a V69A, a Q74P, a N88D or N88R mutation, and a L53I mutation. In some embodiments, the IL-2 mutein comprises a V69A, a Q74P, a N88D or N88R mutation, and a L56I mutation. In some embodiments, the IL-2 mutein comprises a V69A, a Q74P, a N88D or N88R mutation, and a L80I mutation. In some embodiments, the IL-2 mutein comprises a V69A, a Q74P, a N88D or N88R mutation, and a L1181 mutation. As provided for herein, the muteins can also comprise a C125A or C125S mutation.

[0164] In some embodiments, the mutein comprises a T3A mutation. The full length IL-2 muteins provided herein may not be illustrated with a T3A or other mutations provided for herein, but such mutations can be added into the muteins provided herein as is the case for any of the other mutations illustrated herein. Accordingly, In some embodiments, the mutein comprises a T3N mutation. In some embodiments, the mutein comprises a T3A mutation. In some embodiments, the mutein comprises a L12G mutation. In some embodiments, the mutein comprises a L12K mutation. In some embodiments, the mutein comprises a L12Q mutation. In some embodiments, the mutein comprises a L12S mutation. In some embodiments, the mutein comprises a Q13G mutation. In some embodiments, the mutein comprises a E15A mutation. In some embodiments, the mutein comprises a E15G mutation. In some embodiments, the mutein comprises a E15S mutation. In some embodiments, the mutein comprises a H16A mutation. In some embodiments, the mutein comprises a H16D mutation. In some embodiments, the mutein comprises a H16G mutation. In some embodiments, the mutein comprises a H16K mutation. In some embodiments, the mutein comprises a H16M mutation. In some embodiments, the mutein comprises a H16N mutation. In some embodiments, the mutein comprises a H16R mutation. In some embodiments, the mutein comprises a H16S mutation. In some embodiments, the mutein comprises a H16T mutation. In some embodiments, the mutein comprises a H16V mutation. In some embodiments, the mutein comprises a H16Y mutation. In some embodiments, the mutein comprises a L19A mutation. In some embodiments, the mutein comprises a L19D mutation. In some embodiments, the mutein comprises a L19E mutation. In some embodiments, the mutein comprises a L19G mutation. In some embodiments, the mutein comprises a L19N mutation. In some embodiments, the mutein comprises a L19R mutation. In some embodiments, the mutein comprises a L19S mutation. In some embodiments, the mutein comprises a L19T mutation. In some embodiments, the mutein comprises a L19V mutation. In some embodiments, the mutein comprises a D20A mutation. In some embodiments, the mutein comprises a D20E mutation. In some embodiments, the mutein comprises a D20H mutation. In some embodiments, the mutein comprises a D20I mutation. In some embodiments, the mutein comprises a D20Y mutation. In some embodiments, the mutein comprises a D20F mutation. In some embodiments, the mutein comprises a D20G mutation. In some embodiments, the mutein comprises a D20T mutation. In some embodiments, the mutein comprises a D20W mutation. In some embodiments, the mutein comprises a M23R mutation. In some embodiments, the mutein comprises a R81A mutation. In some embodiments, the mutein comprises a R81G mutation. In some embodiments, the mutein comprises a R81S mutation. In some embodiments, the mutein comprises a R81T mutation. In some embodiments, the mutein comprises a D84A mutation. In some embodiments, the mutein comprises a D84E mutation. In some embodiments, the mutein comprises a D84G mutation. In some embodiments, the mutein comprises a D84I mutation. In some embodiments, the mutein comprises a D84M mutation. In some embodiments, the mutein comprises a D84Q mutation. In some embodiments, the mutein comprises a D84R mutation. In some embodiments, the mutein comprises a D84S mutation. In some embodiments, the mutein comprises a D84T mutation. In some embodiments, the mutein comprises a S87R mutation. In some embodiments, the mutein comprises a N88A mutation. In some embodiments, the mutein comprises a N88D mutation. In some embodiments, the mutein comprises a N88E mutation. In some embodiments, the mutein comprises a N88I mutation. In some embodiments, the mutein comprises a N88F mutation. In some embodiments, the mutein comprises a N88G mutation. In some embodiments, the mutein comprises a N88M mutation. In some embodiments, the mutein comprises a N88R mutation. In some embodiments, the mutein comprises a N88S mutation. In some embodiments, the mutein comprises a N88V mutation. In some embodiments, the mutein comprises a N88W mutation. In some embodiments, the mutein comprises a V91D mutation. In some embodiments, the mutein comprises a V91E mutation. In some embodiments, the mutein comprises a V91G mutation. In some embodiments, the mutein comprises a V91S mutation. In some embodiments, the mutein comprises a I92K mutation. In some embodiments, the mutein comprises a I92R mutation. In some embodiments, the mutein comprises a E95G mutation. In some embodiments, the mutein comprises a Q126 mutation.

[0165] Although the mutations are illustrated in list form, this is simply for convenience and the muteins may have one or more of the substitutions provided herein.

[0166] In some embodiments, the IL-2 mutein molecule comprises a substitution selected from the group consisting of: N88R, N88I, N88G, D20H, D109C, Q126L, Q126F, D84G, or D84I relative to mature human IL-2 sequence provided above. In some embodiments, the IL-2 mutein molecule comprises a substitution of D109C and one or both of a N88R substitution and a C125S substitution. In some embodiments, the cysteine that is in the IL-2 mutein molecule at position 109 is linked to a polyethylene glycol moiety, wherein the polyethylene glycol moiety has a molecular weight of between 5 and 40 kDa.

[0167] In some embodiments, any of the substitutions described herein are combined with a substitution at position 125. The substitution can be a C125S, C125A, or C125V substitution.

[0168] In addition to the substitutions or mutations described herein, in some embodiments, the IL-2 mutein has a substitution/mutation at one or more of positions 73, 76, 100, or 138 that correspond to SEQ ID NO: 15 or positions at one or more of positions 53, 56, 80, or 118 that correspond to SEQ ID NO: 6. In some embodiments, the IL-2 mutein comprises a mutation at positions 73 and 76; 73 and 100; 73 and 138; 76 and 100; 76 and 138; 100 and 138; 73, 76, and 100; 73, 76, and 138; 73, 100, and 138; 76, 100 and 138; or at each of 73, 76, 100, and 138 that correspond to SEQ ID NO: 15. In some embodiments, the IL-2 mutein comprises a mutation at positions 53 and 56; 53 and 80; 53 and 118; 56 and 80; 56 and 118; 80 and 118; 53, 56, and 80; 53, 56, and 118; 53, 80, and 118; 56, 80 and 118; or at each of 53, 56, 80, and 118 that correspond to SEQ ID NO: 6. As the IL-2 can be fused or tethered to other proteins, as used herein, the term corresponds to as reference to a SEQ ID NOs: 6 or 15 refer to how the sequences would align with default settings for alignment software, such as can be used with the NCBI website. In some embodiments, the mutation is leucine to isoleucine. Thus, the IL-2 mutein can comprise one more isoleucines at positions 73, 76, 100, or 138 that correspond to SEQ ID NO: 15 or positions at one or more of positions 53, 56, 80, or 118 that correspond to SEQ ID NO: 6. In some embodiments, the mutein comprises a mutation at L53 that correspond to SEQ ID NO: 6. In some embodiments, the mutein comprises a mutation at L56 that correspond to SEQ ID NO: 6. In some embodiments, the mutein comprises a mutation at L80 that correspond to SEQ ID NO: 6. In some embodiments, the mutein comprises a mutation at L118 that correspond to SEQ ID NO: 6. In some embodiments, the mutation is leucine to isoleucine. In some embodiments, the mutein also comprises a mutation as position 69, 74, 88, 125, or any combination thereof in these muteins that correspond to SEQ ID NO: 6. In some embodiments, the mutation is a V69A mutation. In some embodiments, the mutation is a Q74P mutation. In some embodiments, the mutation is a N88D or N88R mutation. In some embodiments, the mutation is a C125A or C125S mutation.

[0169] In some embodiments, the IL-2 mutein comprises a mutation at one or more of positions 49, 51, 55, 57, 68, 89, 91, 94, 108, and 145 that correspond to SEQ ID NO: 15 or one or more positions 29, 31, 35, 37, 48, 69, 71, 74, 88, and 125 that correspond to SEQ ID NO: 6. The substitutions can be used alone or in combination with one another. In some embodiments, the IL-2 mutein comprises substitutions at 2, 3, 4, 5, 6, 7, 8, 9, or each of positions 49, 51, 55, 57, 68, 89, 91, 94, 108, and 145. Non-limiting examples such combinations include, but are not limited to, a mutation at positions 49, 51, 55, 57, 68, 89, 91, 94, 108, and 145; 49, 51, 55, 57, 68, 89, 91, 94, and 108; 49, 51, 55, 57, 68, 89, 91, and 94; 49, 51, 55, 57, 68, 89, and 91; 49, 51, 55, 57, 68, and 89; 49, 51, 55, 57, and 68; 49, 51, 55, and 57; 49, 51, and 55; 49 and 51; 51, 55, 57, 68, 89, 91, 94, 108, and 145; 51, 55, 57, 68, 89, 91, 94, and 108; 51, 55, 57, 68, 89, 91, and 94; 51, 55, 57, 68, 89, and 91; 51, 55, 57, 68, and 89; 55, 57, and 68; 55 and 57; 55, 57, 68, 89, 91, 94, 108, and 145; 55, 57, 68, 89, 91, 94, and 108; 55, 57, 68, 89, 91, and 94; 55, 57, 68, 89, 91, and 94; 55, 57, 68, 89, and 91; 55, 57, 68, and 89; 55, 57, and 68; 55 and 57; 57, 68, 89, 91, 94, 108, and 145; 57, 68, 89, 91, 94, and 108; 57, 68, 89, 91, and 94; 57, 68, 89, and 91; 57, 68, and 89; 57 and 68; 68, 89, 91, 94, 108, and 145; 68, 89, 91, 94, and 108; 68, 89, 91, and 94; 68, 89, and 91; 68 and 89; 89, 91, 94, 108, and 145; 89, 91, 94, and 108; 89, 91, and 94; 89 and 91; 91, 94, 108, and 145; 91, 94, and 108; 91, and 94; or 94 and 108. Each mutation can be combined with one another. The same substitutions can be made in SEQ ID NO: 6, but the numbering would adjust appropriately as is clear from the present disclosure (20 less than the numbering for SEQ ID NO: 15 corresponds to the positions in SEQ ID NO: 6).

[0170] In some embodiments, the IL-2 mutein comprises a mutation at one or more positions of 35, 36, 42, 104, 115, or 146 that correspond to SEQ ID NO: 15 or the equivalent positions at SEQ ID NO: 6 (e.g. positions 15, 16, 22, 84, 95, or 126). These mutations can be combined with the other leucine to isoleucine mutations described herein or the mutation at positions 73, 76, 100, or 138 that correspond to SEQ ID NO: 15 or at one or more of positions 53, 56, 80, or 118 that correspond to SEQ ID NO: 6. In some embodiments, the mutation is a E35Q, H36N, Q42E, D104N, E115Q, or Q146E, or any combination thereof. In some embodiments, one or more of these substitutions is wild type. In some embodiments, the mutein comprises a wild-type residue at one or more of positions 35, 36, 42, 104, 115, or 146 that correspond to SEQ ID NO: 15 or the equivalent positions at SEQ ID NO: 6 (e.g. positions 15, 16, 22, 84, 95, and 126).

[0171] The mutations at these positions can be combined with any of the other mutations described herein, including, but not limited to substitutions at positions 73, 76, 100, or 138 that correspond to SEQ ID NO: 15 or positions at one or more of positions 53, 56, 80, or 118 that correspond to SEQ ID NO: 6 described herein and above. In some embodiments, the IL-2 mutein comprises a N49S mutation that corresponds to SEQ ID NO: 15. In some embodiments, the IL-2 mutein comprises a Y51S or a Y51H mutation that corresponds to SEQ ID NO: 15. In some embodiments, the IL-2 mutein comprises a K55R mutation that corresponds to SEQ ID NO: 15. In some embodiments, the IL-2 mutein comprises a T57A mutation that corresponds to SEQ ID NO: 15. In some embodiments, the IL-2 mutein comprises a K68E mutation that corresponds to SEQ ID NO: 15. In some embodiments, the IL-2 mutein comprises a V89A mutation that corresponds to SEQ ID NO: 15. In some embodiments, the IL-2 mutein comprises a N91R mutation that corresponds to SEQ ID NO: 15. In some embodiments, the IL-2 mutein comprises a Q94P mutation that corresponds to SEQ ID NO: 15. In some embodiments, the IL-2 mutein comprises a N108D or a N108R mutation that corresponds to SEQ ID NO: 15. In some embodiments, the IL-2 mutein comprises a C145A or C145S mutation that corresponds to SEQ ID NO: 15. These substitutions can be used alone or in combination with one another. In some embodiments, the mutein comprises each of these substitutions. In some embodiments, the mutein comprises 1, 2, 3, 4, 5, 6, 7, or 8 of these mutations. In some embodiments, the mutein comprises a wild-type residue at one or more of positions 35, 36, 42, 104, 115, or 146 that correspond to SEQ ID NO: 15 or the equivalent positions at SEQ ID NO: 6 (e.g. positions 15, 16, 22, 84, 95, and 126).

[0172] In some embodiments, the IL-2 mutein comprises a N29S mutation that corresponds to SEQ ID NO: 6. In some embodiments, the IL-2 mutein comprises a Y31S or a Y31H mutation that corresponds to SEQ ID NO: 6. In some embodiments, the IL-2 mutein comprises a K35R mutation that corresponds to SEQ ID NO: 6. In some embodiments, the IL-2 mutein comprises a T37A mutation that corresponds to SEQ ID NO: 6. In some embodiments, the IL-2 mutein comprises a K48E mutation that corresponds to SEQ ID NO: 6. In some embodiments, the IL-2 mutein comprises a V69A mutation that corresponds to SEQ ID NO: 6. In some embodiments, the IL-2 mutein comprises a N71R mutation that corresponds to SEQ ID NO: 6. In some embodiments, the IL-2 mutein comprises a Q74P mutation that corresponds to SEQ ID NO: 6. In some embodiments, the IL-2 mutein comprises a N88D or a N88R mutation that corresponds to SEQ ID NO: 6. In some embodiments, the IL-2 mutein comprises a C125A or C125S mutation that corresponds to SEQ ID NO: 6. These substitutions can be used alone or in combination with one another. In some embodiments, the mutein comprises 1, 2, 3, 4, 5, 6, 7, or 8 of these mutations. In some embodiments, the mutein comprises each of these substitutions. In some embodiments, the mutein comprises a wild-type residue at one or more of positions 35, 36, 42, 104, 115, or 146 that correspond to SEQ ID NO: 15 or the equivalent positions at SEQ ID NO: 6 (e.g., positions 15, 16, 22, 84, 95, and 126).

[0173] For any of the IL-2 muteins described herein, in some embodiments, one or more of positions 35, 36, 42, 104, 115, or 146 that correspond to SEQ ID NO: 15 or the equivalent positions at SEQ ID NO: 6 (e.g. positions 15, 16, 22, 84, 95, or 126) are wild-type (e.g., are as shown in SEQ ID NOs: 6 or 15). In some embodiments, 2, 3, 4, 5, 6, or each of positions 35, 36, 42, 104, 115, or 146 that correspond to SEQ ID NO: 15 or the equivalent positions at SEQ ID NO: 6 (e.g. positions 15, 16, 22, 84, 95, and 126) are wild-type.

[0174] In some embodiments, the IL-2 mutein comprises a sequence of:

(SEQ ID NO: 16)
MYRMQLLSCIALSLALVTNSAPTSSSTKKTQLQLEHLLLDLQMI
LNGISNHKNPRLARMLTFKFYMPEKATEIKHLQCLEEELKPLEE
ALRLAPSKNFHLRPRDLISDINVIVLELKGSETTFMCEYADETA
TIVEFLNRWITFSQSIISTLT.

[0175] In some embodiments, the IL-2 mutein comprises a sequence of:

(SEQ ID NO: 17)
MYRMQLLSCIALSLALVTNSAPTSSSTKKTQLQLEHLLLDLQMI
LNGISNHKNPRLARMLTFKFYMPEKATELKHIQCLEEELKPLEE
ALRLAPSKNFHLRPRDLISDINVIVLELKGSETTFMCEYADETA
TIVEFLNRWITFSQSIISTLT.

[0176] In some embodiments, the IL-2 mutein comprises a sequence of:

(SEQ ID NO: 18)
MYRMQLLSCIALSLALVTNSAPTSSSTKKTQLQLEHLLLDLQMI
LNGISNHKNPRLARMLTFKFYMPEKATELKHLQCLEEELKPLEE
ALRLAPSKNFHIRPRDLISDINVIVLELKGSETTFMCEYADETA
TIVEFLNRWITFSQSIISTLT.

[0177] In some embodiments, the IL-2 mutein comprises a sequence of:

(SEQ ID NO: 19)
MYRMQLLSCIALSLALVTNSAPTSSSTKKTQLQLEHLLLDLQMI
LNGISNHKNPRLARMLTFKFYMPEKATELKHLQCLEEELKPLEE
ALRLAPSKNFHLRPRDLISDINVIVLELKGSETTFMCEYADETA
TIVEFINRWITFSQSIISTLT.

[0178] In some embodiments, the IL-2 mutein sequences described herein do not comprise the IL-2 leader sequence. The IL-2 leader sequence can be represented by the sequence of MYRMQLLSCIALSLALVTNS (SEQ ID NO: 20). Therefore, in some embodiments, the sequences illustrated above can also encompass peptides without the leader sequence. Although SEQ ID NOs: 16-20 are illustrated with only mutation at one of positions 73, 76, 100, or 138 that correspond to SEQ ID NO: 15 or positions at one or more of positions 53, 56, 80, or 118 that correspond to SEQ ID NO: 6, the peptides can comprise one, two, three or 4 of the mutations at these positions. In some embodiments, the substitution at each position is isoleucine or other type of conservative amino acid substitution. In some embodiments, the leucine at the recited positions are substituted with, independently, isoleucine, valine, methionine, or phenylalanine.

[0179] In some embodiments, the IL-2 mutein molecule is fused to a Fc Region or other linker region as described herein. Examples of such fusion proteins can be found in U.S. Pat. Nos. 9,580,486, 7,105,653, 9,616,105, 9,428,567, US2017/0051029, WO2016/164937, US2014/0286898A1, WO2014153111A2, WO2010/085495, WO2016014428A2, WO2016025385A1, US2017/0037102, and US2006/0269515, each of which are incorporated by reference in its entirety.

[0180] In some embodiments, the Fc Region comprises what is known as the LALA mutation. Using the Kabat numbering of the Fc region, this would correspond to L247A, L248A, and G250A. In some embodiments, using the EU numbering of the Fc region, the Fc region comprises a L234A mutation, a L235A mutation, and/or a G237A mutation. Regardless of the numbering system used, in some embodiments, the Fc portion can comprise mutations that correspond to these residues. In some embodiments, the Fe Region comprises N297G or N297A (kabat numbering) mutations. The Kabat numbering is based upon a full-length sequence, but would be used in a fragment based upon a traditional alignment used by one of skill in the art for the Fc region.

[0181] In some embodiments, the Fc Region comprises a sequence of:

(SEQ ID NO: 21)
DKTHTCPPCPAPEAAGAPSVFLFPPKPKDTLMISRTPEVTCVVV
DVSHEDPEVKFNWYVDGVEVHNAKTKPREEQYNSTYRVVSVLTV
LHQDWLNGKEYKCKVSNKALPAPIEKTISKAKGQPREPQVYTLP
PSREEMTKNQVSLTCLVKGFYPSDIAVEWESNGQPENNYKTTPP
VLDSDGSFFLYSKLTVDKSRWQQGNVFSCSVMHEALHNHYTQKS
LSLSPG;
or
(SEQ ID NO: 28)
DKTHTCPPCPAPELLGGPSVFLFPPKPKDTLMISRTPEVTCVVV
DVSHEDPEVKFNWYVDGVEVHNAKTKPREEQYNSTYRVVSVLTV
LHQDWLNGKEYKCKVSNKALPAPIEKTISKAKGQPREPQVYTLP
PSREEMTKNQVSLTCLVKGFYPSDIAVEWESNGQPENNYKTTPP
VLDSDGSFFLYSKLTVDKSRWQQGNVFSCSVMHEALHNHYTQKS
LSLSPG.

[0182] In some embodiments, the IL-2 mutein is linked to the Fc Region. Non-limiting examples of linkers are glycine/serine linkers. For example, a glycine/serine linkers can be a sequence of GGGGSGGGGSGGGGSGGGGS (SEQ ID NO: 22) or GGGGSGGGGSGGGGS (SEQ ID NO: 30). This is simply a non-limiting example and the linker can have varying number of GGGGS (SEQ ID NO: 23) or GGGGA repeats (SEQ ID NO: 29). In some embodiments, the linker comprises 1, 2, 3, 4, 5, 6, 7, 8, 9, or 10 of the GGGGS (SEQ ID NO: 23) or GGGGA repeats (SEQ ID NO: 29) repeats (repeats disclosed as SEQ ID NOS 1550-1551, respectively). In some embodiments, the linker is 10 amino acids in length. In some embodiments, the linker is 5 amino acids in length. In some embodiments, the linker is 15 amino acids in length. In some embodiments, the linker is 20 amino acids in length. In some embodiments, the linker is 25 amino acids in length. In some embodiments, the linker is 30 amino acids in length. In some embodiments, the linker is 35 amino acids in length. In some embodiments, the linker is from 5-50 amino acids in length.

[0183] Thus, the IL-2/Fc Fusion can be represented by the formula of Z_{IL-2M}-L_{gs}-Z_{Fc}, wherein Z_{IL-2M} is an IL-2 mutein as described herein, L_{gs} is a linker sequence as described herein (e.g. glycine/serine linker) and Z_{Fc} is a Fc region described herein or known to one of skill in the art. In some embodiments, the formula can be in the reverse orientation Z_{Fc}-L_{gs}-Z_{IL-2M}.

[0184] In some embodiments, the IL-2/Fc fusion comprises a sequence of

(SEQ ID NO: 24)
MYRMQLLSCIALSLALVTNSAPTSSSTKKTQLQLEHLLLDLQMI
LNGISNHKNPRLARMLTFKFYMPEKATEIKHLQCLEEELKPLEE
ALRLAPSKNFHLRPRDLISDINVIVLELKGSETTFMCEYADETA
TIVEFLNRWITFSQSIISTLTGGGGSGGGGSGGGGSGGGGSDKT
HTCPPCPAPEAAGAPSVFLFPPKPKDTLMISRTPEVTCVVVDVS
HEDPEVKFNWYVDGVEVHNAKTKPREEQYNSTYRVVSVLTVLHQ
DWLNGKEYKCKVSNKALPAPIEKTISKAKGQPREPQVYTLPPSR
EEMTKNQVSLTCLVKGFYPSDIAVEWESNGQPENNYKTTPPVLD
SDGSFFLYSKLTVDKSRWQQGNVFSCSVMHEALHNHYTQKSLSL
SPG;
(SEQ ID NO: 25)
MYRMQLLSCIALSLALVTNSAPTSSSTKKTQLQLEHLLLDLQMI
LNGISNHKNPRLARMLTFKFYMPEKATELKHIQCLEEELKPLEE
ALRLAPSKNFHLRPRDLISDINVIVLELKGSETTFMCEYADETA
TIVEFLNRWITFSQSIISTLTGGGGSGGGGSGGGGSGGGGSDKT
HTCPPCPAPEAAGAPSVFLFPPKPKDTLMISRTPEVTCVVVDVS
HEDPEVKFNWYVDGVEVHNAKTKPREEQYNSTYRVVSVLTVLHQ
DWLNGKEYKCKVSNKALPAPIEKTISKAKGQPREPQVYTLPPSR
EEMTKNQVSLTCLVKGFYPSDIAVEWESNGQPENNYKTTPPVLD
SDGSFFLYSKLTVDKSRWQQGNVFSCSVMHEALHNHYTQKSLSL
SPG;
(SEQ ID NO: 26)
MYRMQLLSCIALSLALVTNSAPTSSSTKKTQLQLEHLLLDLQMI
LNGISNHKNPRLARMLTFKFYMPEKATELKHLQCLEEELKPLEE
ALRLAPSKNFHIRPRDLISDINVIVLELKGSETTFMCEYADETA
TIVEFLNRWITFSQSIISTLTGGGGSGGGGSGGGGSGGGGSDKT
HTCPPCPAPEAAGAPSVFLFPPKPKDTLMISRTPEVTCVVVDVS
HEDPEVKFNWYVDGVEVHNAKTKPREEQYNSTYRVVSVLTVLHQ
DWLNGKEYKCKVSNKALPAPIEKTISKAKGQPREPQVYTLPPSR
EEMTKNQVSLTCLVKGFYPSDIAVEWESNGQPENNYKTTPPVLD
SDGSFFLYSKLTVDKSRWQQGNVFSCSVMHEALHNHYTQKSLSL
SPG;
or
(SEQ ID NO: 27)
MYRMQLLSCIALSLALVTNSAPTSSSTKKTQLQLEHLLLDLQMI
LNGISNHKNPRLARMLTFKFYMPEKATELKHLQCLEEELKPLEE
ALRLAPSKNFHLRPRDLISDINVIVLELKGSETTFMCEYADETA
TIVEFINRWITFSQSIISTLTGGGGSGGGGSGGGGSGGGGSDKT
HTCPPCPAPEAAGAPSVELFPPKPKDTLMISRTPEVTCVVVDVS
HEDPEVKFNWYVDGVEVHNAKTKPREEQYNSTYRVVSVLTVLHQ
DWLNGKEYKCKVSNKALPAPIEKTISKAKGQPREPQVYTLPPSR
EEMTKNQVSLTCLVKGFYPSDIAVEWESNGQPENNYKTTPPVLD
SDGSFFLYSKLTVDKSRWQQGNVFSCSVMHEALHNHYTQKSLSL
SPG.

[0185] In some embodiments, the IL-2/Fc Fusion comprises a sequence selected from the following table, Table 3.

TABLE 3
IL-2/Fc Fusion Protein Amino Acid Sequences

| Sequence | |
|---|---|
| Identification | Sequence |
| SEQ ID NO: 7 | APTSSSTKKTQLQLEHLLLDLQMILNGINNYKNPKLTRMLTFKFYMPKKATELKHLQCLEE |
| | ELKPLEEVLNLAQSKNFHLRPRDLISRINVIVLELKGSETTFMCEYADETATIVEFLNRWI |
| | TFSQSIISTLTGGGGAGGGGDKTHTCPPCPAPELLGGPSVFLFPPKPKDTLMISRTPEVTC |
| | VVVDVSHEDPEVKFNWYVDGVEVHNAKTKPREEQYASTYRVVSVLTVLHQDWLNGKEYKCK |
| | VSNKALPAPIEKTISKAKGQPREPQVYTLPPSRDELTKNQVSLTCLVKGFYPSDIAVEWES |
| | NGQPENNYKTTPPVLDSDGSFFLYSKLTVDKSRWQQGNVFSCSVMHEALHNHYTQKSLSLS |
| | PGK |
| SEQ ID NO: 8 | APTSSSTKKTQLQLEHLLLHLQMILNGINNYKNPKLTRMLTFKFYMPKKATELKHLQCLEE |
| | ELKPLEEVLNLAQSKNFHLRPRDLISNINVIVLELKGSETTFMCEYADETATIVEFLNRWI |
| | TFSQSIISTLTVECPPCPAPPVAGPSVFLFPPKPKDTLMISRTPEVTCVVVDVSHEDPEVQ |
| | FNWYVDGVEVHNAKTKPREEQFNSTFRVVSVLTVVHQDWLNGKEYKCKVSNKGLPAPIEKT |
| | ISKTKGQPREPQVYTLPPSREEMTKNQVSLTCLVKGFYPSDIAVEWESNGQPENNYKTTPP |
| | MLDSDGSFFLYSKLTVDKSRWQQGNVFSCSVMHEALHNHYTQKSLSLSPGK |
| SEQ ID NO: 9 | APTSSSTKKTQLQLEHLLLDLQMILNGINNYKNPKLTRMLTFKFYMPKKATELKHLQCLEE |
| | ELKPLEEVLNLAQSKNFHLRPRDLISRINVIVLELKGSETTFMCEYADETATIVEFLNRWI |
| | TFSQSIISTLTDKTHTCPPCPAPELLGGPSVFLFPPKPKDTLMISRTPEVTCVVVDVSHED |
| | PEVKFNWYVDGVEVHNAKTKPREEQYASTYRVVSVLTVLHQDWLNGKEYKCKVSNKALPAP |
| | IEKTISKAKGQPREPQVYTLPPSRDELTKNQVSLTCLVKGFYPSDIAVEWESNGQPENNYK |
| | TTPPVLDSDGSFFLYSKLTVDKSRWQQGNVFSCSVMHEALHNHYTQKSLSLSPG |
| SEQ ID NO: 10 | APTSSSTKKTQLQLEHLLLDLQMILNGINNYKNPKLTRMLTFKFYMPKKATELKHLQCLEE |
| | ELKPLEEVLNLAQSKNFHLRPRDLISRINVIVLELKGSETTFMCEYADETATIVEFLNRWI |
| | TFSQSIISTLTGGGGSDKTHTCPPCPAPELLGGPSVFLFPPKPKDTLMISRTPEVTCVVVD |
| | VSHEDPEVKENWYVDGVEVHNAKTKPREEQYASTYRVVSVLTVLHQDWLNGKEYKCKVSNK |
| | ALPAPIEKTISKAKGQPREPQVYTLPPSRDELTKNQVSLTCLVKGFYPSDIAVEWESNGQP |
| | ENNYKTTPPVLDSDGSFFLYSKLTVDKSRWQQGNVFSCSVMHEALHNHYTQKSLSLSPG |
| SEQ ID NO: 11 | APTSSSTKKTQLQLEHLLLDLQMILNGINNYKNPKLTRMLTFKFYMPKKATELKHLQCLEE |
| | ELKPLEEVLNLAQSKNFHLRPRDLISRINVIVLELKGSETTFMCEYADETATIVEFLNRWI |
| | TFSQSIISTLTGGGGSGGGGSDKTHTCPPCPAPELLGGPSVFLFPPKPKDTLMISRTPEVT |
| | CVVVDVSHEDPEVKFNWYVDGVEVHNAKTKPREEQYASTYRVVSVLTVLHQDWLNGKEYKC |
| | KVSNKALPAPIEKTISKAKGQPREPQVYTLPPSRDELTKNQVSLTCLVKGFYPSDIAVEWE |
| | SNGQPENNYKTTPPVLDSDGSFFLYSKLTVDKSRWQQGNVFSCSVMHEALHNHYTQKSLSL |
| | SPG |
| SEQ ID NO: 12 | APTSSSTKKTQLQLEHLLLDLQMILNGINNYKNPKLTRMLTFKFYMPKKATELKHLQCLEE |
| | ELKPLEEVLNLAQSKNFHLRPRDLISRINVIVLELKGSETTFMCEYADETATIVEFLNRWI |
| | TFSQSIISTLTGGGGSGGGGSGGGGSDKTHTCPPCPAPELLGGPSVFLFPPKPKDTLMISR |
| | TPEVTCVVVDVSHEDPEVKFNWYVDGVEVHNAKTKPREEQYASTYRVVSVLTVLHQDWLNG |
| | KEYKCKVSNKALPAPIEKTISKAKGQPREPQVYTLPPSRDELTKNQVSLTCLVKGFYPSDI |
| | AVEWESNGQPENNYKTTPPVLDSDGSFFLYSKLTVDKSRWQQGNVFSCSVMHEALHNYHTQ |
| | KSLSLSPG |
| SEQ ID NO: 13 | APTSSSTKKTQLQLEHLLLDLQMILNGINNYKNPKLTRMLTFKFYMPKKATELKHLQCLEE |
| | ELKPLEEVLNLAQSKNFHLRPRDLISRINVIVLELKGSETTFMCEYADETATIVEFLNRWI |
| | TFSQSIISTLTGGGGSGGGGSGGGGSGGGGSDKTHTCPPCPAPELLGGPSVFLFPPKPKDT |
| | LMISRTPEVTCVVVDVSHEDPEVKFNWYVDGVEVHNAKTKPREEQYASTYRVVSVLTVLHQ |
| | DWLNGKEYKCKVSNKALPAPIEKTISKAKGQPREPQVYTLPPSRDELTKNQVSLTCLVKGF |
| | YPSDIAVEWESNGQPENNYKTTPPVLDSDGSFFLYSKLTVDKSRWQQGNVFSCSVMHEALH |
| | NHYTQKSLSLSPG |
| SEQ ID NO: 14 | APTSSSTKKTQLQLEHLLLHLQMILNGINNYKNPKLTRMLTFKFYMPKKATELKHLQCLEE |
| | ELKPLEEVLNLAQSKNFHLRPRDLISNINVIVLELKGSETTFMCEYADETATIVEFLNRWI |
| | TFSQSIISTLTGGGGSGGGGSGGGGSDKTHTCPPCPAPELLGGPSVFLFPPKPKDTLMISR |
| | TPEVTCVVVDVSHEDPEVKFNWYVDGVEVHNAKTKPREEQYASTYPVVSVLTVLHQDWLNG |
| | KEYKCKVSNKALPAPIEKTISKAKGQPREPQVYTLPPSRDELTKNQVSLTCLVKGFYPSDI |
| | AVEWESNGQPENNYKTTPPVLDSDGSFFLYSKLTVDKSRWQQGNVFSCSVMHEALHNHYTQ |
| | KSLSLSPG |

[0186] In some embodiments, the IL-2 muteins comprises one or more of the sequences provided in the following table, which, in some embodiments, shows the IL-2 mutein fused with other proteins or linkers. The table also provides sequences for a variety of Fc domains or variants that the IL-2 can be fused with:

| SEQ ID | Brief | |
|---|---|---|
| NO: | Description | Amino Acid Sequence |
| 31 | Human IL-2 | APTSSSTKKTQLQLEHLLLDLQMILNGINNYKNPKLTRMLTFKFYMPKKA |
| | with C125S | TELKHLQCLEEELKPLEEVLNLAQSKNFHLRPRDLISNINVIVLELKGSE |
| | mutation | TTFMCEYADETATIVEFLNRWITFSQSIISTLT |
| 32 | Human IL-2 | APASSSTKKTQLQLEHLLLDLQMILNGINNYKNPKLTRMLTFKFYMPKKA |
| | with C125S | TELKHLQCLEEELKPLEEVLNLAQSKNFHLRPRDLISNINVIVLELKGSE |
| | and T3A | TTFMCEYADETATIVEFLNRWITFSQSIISTLT |
| | mutations | |
| 33 | Human IL-2 | APTSSSTKKTQLQLEHLLLDLQMILNGINNYKNPKLTRMLTFKFYMPKKA |
| | with N88R and | TELKHLQCLEEELKPLEEVLNLAQSKNFHLRPRDLISRINVIVLELKGSE |
| | C125S | TTFMCEYADETATIVEFLNRWITFSQSIISTLT |
| 34 | Human IL-2 | APTSSSTKKTQLQLEHLLLDLQMILNGINNYKNPKLTRMLTFKFYMPKKA |
| | with V69A, | TELKHLQCLEEELKPLEEALNLAPSKNFHLRPRDLISNINVIVLELKGSE |
| | Q74P and | TTFMCEYADETATIVEFLNRWITFSQSIISTLT |
| | C125S | |
| | mutations | |
| 35 | Human IL-2 | APTSSSTKKTQLQLEHLLLDLQMILNGINNYKNPKLTRMLTFKFYMPKKA |
| | with V69A, | TELKHLQCLEEELKPLEEALNLAPSKNFHLRPRDLISDINVIVLELKGSE |
| | Q74P, N88D | TTFMCEYADETATIVEFLNRWITFSQSIISTLT |
| | and C125S | |
| | mutations | |
| 36 | Human IL-2 | APTSSSTKKTQLQLEHLLLDLQMILNGINNYKNPKLTRMLTFKFYMPKKA |
| | with V69A, | TELKHLQCLEEELKPLEEALNLAPSKNFHLRPRDLISRINVIVLELKGSE |
| | Q74P, N88R | TTFMCEYADETATIVEFLNRWITFSQSIISTLT |
| | and C125S | |
| | mutations | |
| 37 | Human IL-2 | APTSSSTKKTQLQLEHLLLDLQMILNGINNYKNPKLTRMLTFKFYMPKKA |
| | with N88D and | TELKHLQCLEEELKPLEEVLNLAQSKNFHLRPRDLISDINVIVLELKGSE |
| | C125S | TTFMCEYADETATIVEFLNRWITFSQSIISTLT |
| 38 | Human IL-2 | APTSSSTKKTQLQLEHLLLDLQMILNGINNYKNPKLTRMLTFKFYMPKKA |
| | with L53I, | TEIKHLQCLEEELKPLEEALNLAPSKNFHLRPRDLISDINVIVLELKGSE |
| | V69A, Q74P, | TTFMCEYADETATIVEFLNRWITFSQSIISTLT |
| | N88D and | |
| | C125S | |
| | mutations | |
| 39 | Human IL-2 | APTSSSTKKTQLQLEHLLLDLQMILNGINNYKNPKLTRMLTFKFYMPKKA |
| | with L56I, | TELKHIQCLEEELKPLEEALNLAPSKNFHLRPRDLISDINVIVLELKGSE |
| | V69A, Q74P, | TTFMCEYADETATIVEFLNRWITFSQSIISTLT |
| | N88D and | |
| | C125S | |
| | mutations | |
| 40 | Human IL-2 | APTSSSTKKTQLQLEHLLLDLQMILNGINNYKNPKLTRMLTFKFYMPKKA |
| | with V69A, | TELKHLQCLEEELKPLEEALNLAPSKNFHIRPRDLISDINVIVLELKGSE |
| | Q74P, L80I, | TTFMCEYADETATIVEFLNRWITFSQSIISTLT |
| | N88D and | |
| | C125S | |
| | mutations | |
| 41 | Human IL-2 | APTSSSTKKTQLQLEHLLLDLQMILNGINNYKNPKLTRMLTFKFYMPKKA |
| | with V69A, | TELKHLQCLEEELKPLEEALNLAPSKNFHLRPRDLISDINVIVLELKGSE |
| | Q74P, N88D, | TTFMCEYADETATIVEFINRWITFSQSIISTLT |
| | L118I, and | |
| | C125S | |
| | mutations | |
| 21 | Human IgG1 Fc | DKTHTCPPCPAPEAAGAPSVFLFPPKPKDTLMISRTPEVTCVVVDVSHED |
| | (N-terminal | PEVKFNWYVDGVEVHNAKTKPREEQYNSTYRVVSVLTVLHQDWLNGKEYK |
| | fusions) with | CKVSNKALPAPIEKTISKAKGQPREPQVYTLPPSREEMTKNQVSLTCLVK |
| | L234A, L235A, | GFYPSDIAVEWESNGQPENNYKTTPPVLDSDGSFFLYSKLTVDKSRWQQG |
| | and G237A | NVFSCSVMHEALHNHYTQKSLSLSPG |
| | mutations | |
| 30 | GGGGSGGGGSGGG | GGGGSGGGGSGGGGS |
| | GS linker (15 | |
| | amino acids) | |
| 22 | GGGGSGGGGSGGG | GGGGSGGGGSGGGGSGGGGS |
| | GSGGGGS | |
| | linker (20 | |
| | amino acids) | |
| 23 | GGGGS linker | GGGGS |
| | (5 amino | |
| | acids) | |
| 43 | Human IgG1 Fc | DKTHTCPPCPAPELLGGPSVFLFPPKPKDTLMISRTPEVTCVVVDVSHED |
| | (truncated) | PEVKFNWYVDGVEVHNAKTKPREEQYGSTYRVVSVLTVLHQDWLNGKEYK |
| | with N297G | CKVSNKALPAPIEKTISKAKGQPREPQVYTLPPSREEMTKNQVSLTCLVK |
| | mutation | GFYPSDIAVEWESNGQPENNYKTTPPVLDSDGSFFLYSKLTVDKSRWQQG |
| | | NVFSCSVMHEALHNHYTQKSLSLSPG |
| 44 | Antibody | ASTKGPSVFPLAPSSKSTSGGTAALGCLVKDYFPEPVTVSWNSGALTSGV |
| | Heavy Chain | HTFPAVLQSSGLYSLSSVVTVPSSSLGTQTYICNVNHKPSNTKVDKKVEP |
| | CH1-CH2-CH3 | KSCDKTHTCPPCPAPEAAGAPSVFLFPPKPKDTLMISRTPEVTCVVVDVS |
| | domains | HEDPEVKFNWYVDGVEVHNAKTKPREEQYNSTYRVVSVLTVLHQDWLNGK |
| | (human IgG1 | EYKCKVSNKALPAPIEKTISKAKGQPREPQVYTLPPSREEMTKNQVSLTC |
| | with L234A, | LVKGFYPSDIAVEWESNGQPENNYKTTPPVLDSDGSFFLYSKLTVDKSRW |
| | L235A, and | QQGNVFSCSVMHEALHNHYTQKSLSLSPG |
| | G237A) | |
| 45 | Antibody | RTVAAPSVFIFPPSDEQLKSGTASVVCLLNNFYPREAKVQWKVDNALQSG |
| | Kappa | NSQESVTEQDSKDSTYSLSSTLTLSKADYEKHKVYACEVTHQGLSSPVTK |
| | Constant | SFNRGEC |
| | Domain | |
| | (human) | |
| 46 | IL-2-G4Sx3-Fc | APTSSSTKKTQLQLEHLLLDLQMILNGINNYKNPKLTRMLTFKFYMPKKA |
| | | TELKHLQCLEEELKPLEEVLNLAQSKNFHLRPRDLISNINVIVLELKGSE |
| | | TTFMCEYADETATIVEFLNRWITFSQSIISTLTGGGGSGGGGSGGGGSDK |
| | | THTCPPCPAPEAAGAPSVFLFPPKPKDTLMISRTPEVTCVVVDVSHEDPE |
| | | VKFNWYVDGVEVHNAKTKPREEQYNSTYRVVSVLTVLHQDWLNGKEYKCK |
| | | VSNKALPAPIEKTISKAKGQPREPQVYTLPPSREEMTKNQVSLTCLVKGF |
| | | YPSDIAVEWESNGQPENNYKTTPPVLDSDGSFFLYSKLTVDKSRWQQGNV |
| | | FSCSVMHEALHNHYTQKSLSLSPG |
| 47 | IL-2 T3A- | APASSSTKKTQLQLEHLLLDLQMILNGINNYKNPKLTRMLTFKFYMPKKA |
| | G4Sx3-Fc | TELKHLQCLEEELKPLEEVLNLAQSKNFHLRPRDLISNINVIVLELKGSE |
| | | TTFMCEYADETATIVEFLNRWITFSQSIISTLTGGGGSGGGGSGGGGSDK |
| | | THTCPPCPAPEAAGAPSVFLFPPKPKDTLMISRTPEVTCVVVDVSHEDPE |
| | | VKFNWYVDGVEVHNAKTKPREEQYNSTYRVVSVLTVLHQDWLNGKEYKCK |
| | | VSNKALPAPIEKTISKAKGQPREPQVYTLPPSREEMTKNQVSLTCLVKGF |
| | | YPSDIAVEWESNGQPENNYKTTPPVLDSDGSFFLYSKLTVDKSRWQQGNV |
| | | FSCSVMHEALHNHYTQKSLSLSPG |
| 48 | IL-2 N88R- | APTSSSTKKTQLQLEHLLLDLQMILNGINNYKNPKLTRMLTFKFYMPKKA |
| | G4Sx3-Fc | TELKHLQCLEEELKPLEEVLNLAQSKNFHLRPRDLISRINVIVLELKGSE |
| | | TTFMCEYADETATIVEFLNRWITFSQSIISTLTGGGGSGGGGSGGGGSDK |
| | | THTCPPCPAPEAAGAPSVFLFPPKPKDTLMISRTPEVTCVVVDVSHEDPE |
| | | VKFNWYVDGVEVHNAKTKPREEQYNSTYRVVSVLTVLHQDWLNGKEYKCK |
| | | VSNKALPAPIEKTISKAKGQPREPQVYTLPPSREEMTKNQVSLTCLVKGF |
| | | YPSDIAVEWESNGQPENNYKTTPPVLDSDGSFFLYSKLTVDKSRWQQGNV |
| | | FSCSVMHEALHNHYTQKSLSLSPG |
| 49 | IL-2 V69A, | APTSSSTKKTQLQLEHLLLDLQMILNGINNYKNPKLTRMLTFKFYMPKKA |
| | Q74P,-G4Sx3- | TELKHLQCLEEELKPLEEALNLAPSKNFHLRPRDLISNINVIVLELKGSE |
| | Fc | TTFMCEYADETATIVEFLNRWITFSQSIISTLTGGGGSGGGGSGGGGSDK |
| | | THTCPPCPAPEAAGAPSVFLFPPKPKDTLMISRTPEVTCVVVDVSHEDPE |
| | | VKFNWYVDGVEVHNAKTKPREEQYNSTYRVVSVLTVLHQDWLNGKEYKCK |
| | | VSNKALPAPIEKTISKAKGQPREPQVYTLPPSREEMTKNQVSLTCLVKGF |
| | | YPSDIAVEWESNGQPENNYKTTPPVLDSDGSFFLYSKLTVDKSRWQQGNV |
| | | FSCSVMHEALHNHYTQKSLSLSPG |
| 50 | IL-2 N88D | APTSSSTKKTQLQLEHLLLDLQMILNGINNYKNPKLTRMLTFKFYMPKKA |
| | V69A, Q74P- | TELKHLQCLEEELKPLEEALNLAPSKNFHLRPRDLISDINVIVLELKGSE |
| | G4Sx3-Fc | TTFMCEYADETATIVEFLNRWITFSQSIISTLTGGGGSGGGGSGGGGSDK |
| | | THTCPPCPAPEAAGAPSVFLFPPKPKDTLMISRTPEVTCVVVDVSHEDPE |
| | | VKFNWYVDGVEVHNAKTKPREEQYNSTYRVVSVLTVLHQDWLNGKEYKCK |
| | | VSNKALPAPIEKTISKAKGQPREPQVYTLPPSREEMTKNQVSLTCLVKGF |
| | | YPSDIAVEWESNGQPENNYKTTPPVLDSDGSFFLYSKLTVDKSRWQQGNV |
| | | FSCSVMHEALHNHYTQKSLSLSPG |
| 51 | IL-2 N88R | APTSSSTKKTQLQLEHLLLDLQMILNGINNYKNPKLTRMLTFKFYMPKKA |
| | V69A, Q74P- | TELKHLQCLEEELKPLEEALNLAPSKNFHLRPRDLISRINVIVLELKGSE |
| | G4Sx3-Fc | TTFMCEYADETATIVEFLNRWITFSQSIISTLTGGGGSGGGGSGGGGSDK |
| | | THTCPPCPAPEAAGAPSVFLFPPKPKDTLMISRTPEVTCVVVDVSHEDPE |
| | | VKFNWYVDGVEVHNAKTKPREEQYNSTYRVVSVLTVLHQDWLNGKEYKCK |
| | | VSNKALPAPIEKTISKAKGQPREPQVYTLPPSREEMTKNQVSLTCLVKGF |
| | | YPSDIAVEWESNGQPENNYKTTPPVLDSDGSFFLYSKLTVDKSRWQQGNV |
| | | FSCSVMHEALHNHYTQKSLSLSPG |
| 52 | IL-2 N88D- | APTSSSTKKTQLQLEHLLLDLQMILNGINNYKNPKLTRMLTFKFYMPKKA |
| | G4Sx3-Fc | TELKHLQCLEEELKPLEEVLNLAQSKNFHLRPRDLISDINVIVLELKGSE |
| | | TTFMCEYADETATIVEFLNRWITFSQSIISTLTGGGGSGGGGSGGGGSDK |
| | | THTCPPCPAPEAAGAPSVFLFPPKPKDTLMISRTPEVTCVVVDVSHEDPE |
| | | VKFNWYVDGVEVHNAKTKPREEQYNSTYRVVSVLTVLHQDWLNGKEYKCK |
| | | VSNKALPAPIEKTISKAKGQPREPQVYTLPPSREEMTKNQVSLTCLVKGF |
| | | YPSDIAVEWESNGQPENNYKTTPPVLDSDGSFFLYSKLTVDKSRWQQGNV |
| | | FSCSVMHEALHNHYTQKSLSLSPG |
| 53 | IL-2 L53I | APTSSSTKKTQLQLEHLLLDLQMILNGINNYKNPKLTRMLTFKFYMPKKA |
| | N88D V69A, | TEIKHLQCLEEELKPLEEALNLAPSKNFHLRPRDLISDINVIVLELKGSE |
| | Q74P,C125S- | TTFMCEYADETATIVEFLNRWITFSQSIISTLTGGGGSGGGGSGGGGSGG |
| | G4Sx4-Fc | GGSDKTHTCPPCPAPEAAGAPSVFLFPPKPKDTLMISRTPEVTCVVVDVS |
| | | HEDPEVKFNWYVDGVEVHNAKTKPREEQYNSTYRVVSVLTVLHQDWLNGK |
| | | EYKCKVSNKALPAPIEKTISKAKGQPREPQVYTLPPSREEMTKNQVSLTC |
| | | LVKGFYPSDIAVEWESNGQPENNYKTTPPVLDSDGSFFLYSKLTVDKSRW |
| | | QQGNVFSCSVMHEALHNHYTQKSLSLSPG |
| 54 | IL-2 L56I | APTSSSTKKTQLQLEHLLLDLQMILNGINNYKNPKLTRMLTFKFYMPKKA |
| | N88D V69A, | TELKHIQCLEEELKPLEEALNLAPSKNFHLRPRDLISDINVIVLELKGSE |
| | Q74P, C125S- | TTFMCEYADETATIVEFLNRWITFSQSIISTLTGGGGSGGGGSGGGGSGG |
| | G4Sx4-Fc | GGSDKTHTCPPCPAPEAAGAPSVELFPPKPKDTLMISRTPEVTCVVVDVS |
| | | HEDPEVKFNWYVDGVEVHNAKTKPREEQYNSTYRVVSVLTVLHQDWLNGK |
| | | EYKCKVSNKALPAPIEKTISKAKGQPREPQVYTLPPSREEMTKNQVSLTC |
| | | LVKGFYPSDIAVEWESNGQPENNYKTTPPVLDSDGSFFLYSKLTVDKSRW |
| | | QQGNVFSCSVMHEALHNHYTQKSLSLSPG |
| 55 | IL-2 L80I | APTSSSTKKTQLQLEHLLLDLQMILNGINNYKNPKLTRMLTFKFYMPKKA |
| | N88D V69A, | TELKHLQCLEEELKPLEEALNLAPSKNFHIRPRDLISDINVIVLELKGSE |
| | C125S Q74P- | TTFMCEYADETATIVEFLNRWITFSQSIISTLTGGGGSGGGGSGGGGSGG |
| | G4Sx4-Fc | GGSDKTHTCPPCPAPEAAGAPSVELFPPKPKDTLMISRTPEVTCVVVDVS |
| | | HEDPEVKFNWYVDGVEVHNAKTKPREEQYNSTYRVVSVLTVLHQDWLNGK |
| | | EYKCKVSNKALPAPIEKTISKAKGQPREPQVYTLPPSREEMTKNQVSLTC |
| | | LVKGFYPSDIAVEWESNGQPENNYKTTPPVLDSDGSFFLYSKLTVDKSRW |
| | | QQGNVFSCSVMHEALHNHYTQKSLSLSPG |
| 56 | IL-2 L118I | APTSSSTKKTQLQLEHLLLDLQMILNGINNYKNPKLTRMLTFKFYMPKKA |
| | N88D V69A, | TELKHLQCLEEELKPLEEALNLAPSKNFHLRPRDLISDINVIVLELKGSE |
| | Q74P, C125S- | TTFMCEYADETATIVEFINRWITFSQSIISTLTGGGGSGGGGSGGGGSGG |
| | G4Sx4-Fc | GGSDKTHTCPPCPAPEAAGAPSVFLFPPKPKDTLMISRTPEVTCVVVDVS |
| | | HEDPEVKFNWYVDGVEVHNAKTKPREEQYNSTYRVVSVLTVLHQDWLNGK |
| | | EYKCKVSNKALPAPIEKTISKAKGQPREPQVYTLPPSREEMTKNQVSLTC |
| | | LVKGFYPSDIAVEWESNGQPENNYKTTPPVLDSDGSFFLYSKLTVDKSRW |
| | | QQGNVFSCSVMHEALHNHYTQKSLSLSPG |
| 57 | IL-2 N88D | APTSSSTKKTQLQLEHLLLDLQMILNGINNYKNPKLTRMLTFKFYMPKKA |
| | V69A, Q74P- | TELKHLQCLEEELKPLEEALNLAPSKNFHLRPRDLISDINVIVLELKGSE |
| | G4Sx4-Fc | TTFMCEYADETATIVEFLNRWITFSQSIISTLTGGGGSGGGGSGGGGSGG |
| | | GGSDKTHTCPPCPAPEAAGAPSVFLFPPKPKDTLMISRTPEVTCVVVDVS |
| | | HEDPEVKFNWYVDGVEVHNAKTKPREEQYNSTYRVVSVLTVLHQDWLNGK |
| | | EYKCKVSNKALPAPIEKTISKAKGQPREPQVYTLPPSREEMTKNQVSLTC |
| | | LVKGFYPSDIAVEWESNGQPENNYKTTPPVLDSDGSFFLYSKLTVDKSRW |
| | | QQGNVFSCSVMHEALHNHYTQKSLSLSPG |
| 58 | Fc-G4S-IL-2 | DKTHTCPPCPAPELLGGPSVFLFPPKPKDTLMISRTPEVTCVVVDVSHED |
| | N88D V69A, | PEVKFNWYVDGVEVHNAKTKPREEQYGSTYRVVSVLTVLHQDWLNGKEYK |
| | Q74P | CKVSNKALPAPIEKTISKAKGQPREPQVYTLPPSREEMTKNQVSLTCLVK |
| | | GFYPSDIAVEWESNGQPENNYKTTPPVLDSDGSFFLYSKLTVDKSRWQQG |
| | | NVFSCSVMHEALHNHYTQKSLSLSPGGGGGSAPTSSSTKKTQLQLEHLLL |
| | | DLQMILNGINNYKNPKLTRMLTFKFYMPKKATELKHLQCLEEELKPLEEA |
| | | LNLAPSKNFHLRPRDLISDINVIVLELKGSETTFMCEYADETATIVEFLN |
| | | RWITFAQSIISTLT |
| 59 | IL-2 N88D | APTSSSTKKTQLQLEHLLLDLQMILNGINNYKNPKLTRMLTFKFYMPKKA |
| | V69A, Q74P, | TEX_{1K}HX₂QCLEEELKPLEEALNLAPSKNFHX₃RPRDLISDINVIVLELKG |
| | C125S-G4Sx4- | SETTFMCEYADETATIVEFX₄NRWITFSQSIISTLTGGGGSGGGGSGGGGS |
| | Fc, wherein | GGGGSDKTHTCPPCPAPEAAGAPSVFLFPPKPKDTLMISRTPEVTCVVVD |
| | at least one | VSHEDPEVKFNWYVDGVEVHNAKTKPREEQYNSTYRVVSVLTVLHQDWLN |
| | of X₁, X₂, X₃, | GKEYKCKVSNKALPAPIEKTISKAKGQPREPQVYTLPPSREEMTKNQVSL |
| | and X₄ is I | TCLVKGFYPSDIAVEWESNGQPENNYKTTPPVLDSDGSFFLYSKLTVDKS |
| | and the | RWQQGNVFSCSVMHEALHNHYTQKSLSLSPG |
| | remainder are | |
| | L or I. | |
| 60 | IL-2 N88D | APTSSSTKKTQLQLEHLLLDLQMILNGINNYKNPKLTRMLTFKFYMPKKA |
| | V69A, Q74P, | TEX₁KHX₂QCLEEELKPLEEALNLAPSKNFHX₃RPRDLISDINVIVLELKG |
| | C125S, | SETTFMCEYADETATIVEFX₄NRWITFSQSIISTLT |
| | wherein at | |
| | least one of | |
| | X₁, X₂, X₃, | |
| | and X₄ is I | |
| | and the | |
| | remainder are | |
| | L or I. | |

[0187] In some embodiments, the sequences shown in the table or throughout comprise one or more mutations that correspond to positions L53, L56, L80, and L118. In some embodiments, the sequences shown in the table or throughout do not comprise one or more mutations that correspond to positions L53, L56, L80, and L118. In some embodiments, the sequences shown in the table or throughout the present application comprise one or more mutations that correspond to positions L59I, L631, 124L, L94I, L96I or L132I or other substitutions at the same positions. In some embodiments, the sequences shown in the table or throughout the present application do not comprise one or more mutations that correspond to positions L59I, L631, 124L, L94I, L96I or L132I or other substitutions at the same positions. In some embodiments, the mutation is leucine to isoleucine. In some embodimnets, the mutein does not comprise other mutations than as shown or described herein. In some embodiments, the peptide comprises a sequence of SEQ ID NO: 21, SEQ ID NO: 31, SEQ ID NO: 32, SEQ ID NO: 33, SEQ ID NO: 34, SEQ ID NO: 35, SEQ ID NO: 36, SEQ ID NO: 37, SEQ ID NO: 38, SEQ ID NO: 39, SEQ ID NO: 40, SEQ ID NO: 41, SEQ ID NO: 43, SEQ ID NO: 44, SEQ ID NO: 45, SEQ ID NO: 46, SEQ ID NO: 47, SEQ ID NO: 48, SEQ ID NO: 49, SEQ ID NO: 50, SEQ ID NO: 51, SEQ ID NO: 52, SEQ ID NO: 53, SEQ ID NO: 54, SEQ ID NO: 55, or SEQ ID NO: 56, SEQ ID NO: 57, SEQ ID NO: 58, SEQ ID NO: 59, or SEQ ID NO: 60.

[0188] In some embodiments, the protein comprises an IL-2 mutein as provided for herein. In some embodiments, a polypeptide is provided comprising SEQ ID NO: 59 or SEQ ID NO: 60, wherein at least one of X₁, X₂, X₃, and X₄ is I and the remainder are L or I. In some embodiments, X₁, X₂, and X₃ are L and X₄ is I. In some embodiments, X₁, X₂, and X₄ are L and X₃ is I. In some embodiments, X₂, X₃, and X₄ are L and X₁ is I. In some embodiments, X₁, X₃, and X₄ are L and X₂ is I. In some embodiments, X₁ and X₂ are L and X₃ and X₄ are I. In some embodiments, X₁ and X₃ are L and X₂ and X₄ are I. In some embodiments, X₁ and X₄ are L and X₂ and X₃ are I. In some embodiments, X₂ and X₃ are L and X₁ and X₄ are I. In some embodiments, X₂ and X₄ are L and X₁ and X₃ are I. In some embodiments, X₃ and X₄ are L and X₁ and X₂ are I. In some embodiments, X₁, X₂, and X₃ are L and X₄ is I. In some embodiments, X₂, X₃, and X₄ are L and X₁ is I. In some embodiments, X₁, X₃, and X₄ are L and X₂ is I. In some embodiments, X₁, X₂, and X₄ are L and X₃ is I.

[0189] In some embodiments, the Fc portion of the fusion is not included. In some embodiments, the peptide consists essentially of an IL-2 mutein provided for herein. In some embodiments, the protein is free of a Fc portion.

[0190] For illustrative purposes only, embodiments of an IL-2 mutein fused with a Fc and with a targeting moiety are illustrated in FIG. 19.

[0191] The sequences are for illustrative purposes only and are not intended to be limiting. In some embodiments, the compound comprises an amino acid sequence of SEQ ID NO: 53, 54, 55, or 56. In some embodiments, the compound comprises an amino acid sequence of SEQ ID NO: 53, 54, 55, or 56 with or without a C125A or C125S mutation. In some embodiments, the residue at position 125 is C, S, or A. In some embodiments, the compound comprises an amino acid sequence of SEQ ID NO: 59 or SEQ ID NO: 60, wherein at least one of X₁, X₂, X₃, and X₄ is I and the remainder are L or I. In some embodiments, the protein comprises an IL-2 mutein as provided for herein. In some embodiments, a polypeptide is provided comprising SEQ ID NO: 59 or SEQ ID NO: 60, wherein at least one of X₁, X₂, X₃, and X₄ is I and the remainder are L or I. In some embodiments, X₁, X₂, and X₃ are L and X₄ is I. In some embodiments, X₁, X₂, and X₄ are L and X₃ is I. In some embodiments, X₂, X₃, and X₄ are L and X₁ is I. In some embodiments, X₁, X₃, and X₄ are L and X₂ is I. In some embodiments, X₁ and X₂ are L and X₃ and X₄ are I. In some embodiments, X₁ and X₃ are L and X₂ and X₄ are I. In some embodiments, X₁ and X₄ are L and X₂ and X₃ are I. In some embodiments, X₂ and X₃ are L and X₁ and X₄ are I. In some embodiments, X₂ and X₄ are L and X₁ and X₃ are I. In some embodiments, X₃ and X₄ are L and X₁ and X₂ are I. In some embodiments, X₁, X₂, and X₃ are L and X₄ is I. In some embodiments, X₂, X₃, and X₄ are L and X₁ is I. In some embodiments, X₁, X₃, and X₄ are L and X₂ is I. In some embodiments, X₁, X₂, and X₄ are L and X₃ is I.

[0192] Each of the proteins may also be considered to have the C125S and the LALA and/or G237A mutations as provided for herein. The C125 substitution can also be C125A as described throughout the present application.

[0193] In an embodiment, an IL-2 mutein molecule comprises at least 60, 70, 80, 85, 90, 95, or 97% sequence identity or homology with a naturally occurring human IL-2 molecule, e.g., a naturally occurring IL-2 sequence disclosed herein or those that incorporated by reference.

[0194] As described herein, the IL-2 muteins can be part of a bi-specific molecule with a tethering moiety, such as a MAdCAM antibody that will target the IL-2 mutein to a MAdCAM expressing cell. As described herein, the bispecific molecule can be produced from two polypeptide chains. In some embodiments, the following can be used:

Table of MAdCAM-IL-2 Mutein Bispecific Compounds

| | Chain 1 N-terminal to C-terminal Molecule | | | | | |
|---|---|---|---|---|---|---|
| | Component Sequence IDs | | | | | |
| | | Antibody | | | Chain 2 N-terminal | |
| | | Heavy | | | to C-terminal | |
| | | Chain | | | Molecule Component | |
| | | CH1-CH2- | | C- | Sequence IDs | |
| | Antibody VH | CH3 | | terminal | Light Chain | Light Chain |
| Detail | Domain | Domains | Linker 1 | Moiety | VK Domain | CK Domain |
| 1. Anti- | Rat Anti- | SEQ ID | SEQ ID | SEQ ID | Rat Anti- | SEQ ID |
| MAdCam-Fc- | MAdCam-VH1 | NO: 44 | NO: 23 | NO: 35 | MAdCam-VK1 | NO: 45 |
| IL-2 N88D | | | | | | |
| V69A, Q74P | | | | | | |
| 2. Anti- | Rat Anti- | SEQ ID | SEQ ID | SEQ ID | Rat Anti- | SEQ ID |
| MAdCam- | MAdCam-VH2 | NO: 44 | NO: 23 | NO: 35 | MAdCam-VK2 | NO: 45 |
| Fc-IL-2 | | | | | | |
| N88D V69A, | | | | | | |
| Q74P | | | | | | |
| 3. Anti- | Rat Anti- | SEQ ID | SEQ ID | SEQ ID | Rat Anti- | SEQ ID |
| MAdCam- | MAdCam-VH1 | NO: 44 | NO: 23 | NO: 41 | MAdCam-VK3 | NO: 45 |
| Fc-IL-2 | | | | | | |
| L118I N88D | | | | | | |
| V69A, Q74P | | | | | | |
| 4. TTJ2- | Human TTJ2- | SEQ ID | SEQ ID | SEQ ID | Human TTJ2- | SEQ ID |
| Fc-IL-2 | VH | NO: 44 | NO: 23 | NO: 41 | VK | NO: 45 |
| L118I N88D | | | | | | |
| V69A, Q74P | | | | | | |
| 5. anti | Anti-MAdCam | SEQ ID | SEQ ID | SEQ ID | Anti-MAdCam | SEQ ID |
| hu.MAdCAM- | Human VH3 | NO: 44 | NO: 23 | NO: 41 | Human VK3 | NO: 45 |
| Fc-IL-2 | | | | | | |
| L118I N88D | | | | | | |
| V69A, Q74P | | | | | | |
| 6. anti | Anti-MAdCam | SEQ ID | SEQ ID | SEQ ID | Anti-MAdCam | SEQ ID |
| hu.MAdCAM- | Human VH4 | NO: 44 | NO: 23 | NO: 41 | Human VK4 | NO: 45 |
| Fc-IL-2 | | | | | | |
| L118I N88D | | | | | | |
| V69A, Q74P | | | | | | |
| 7. anti | Anti-MAdCam | SEQ ID | SEQ ID | SEQ ID | Anti-MAdCam | SEQ ID |
| hu.MAdCAM- | Human VH5 | NO: 44 | NO: 23 | NO: 41 | Human VK5 | NO: 45 |
| Fc-IL-2 | | | | | | |
| L118I N88D | | | | | | |
| V69A, Q74P | | | | | | |

[0195] The proteins can be produced with or without a C125A or C125S mutation in the IL-2 mutein. Examples of IL-2 muteins that can be included are illustrated herein, such as, but not limited to, a sequence of SEQ ID NO: 59 or SEQ ID NO: 60.

[0196] In some embodiments, the constant kappa domain in any of the light chains can be replaced with a constant lambda domain.

### Auto-Immune Disorders

[0197] In some embodiments, methods of treating a subject having Type 1 diabetes are provided. In some embodiments, methods of treating a subject having Type 1 diabetes or at risk for developing Type 1 diabetes are provided. In some embodiments, methods of treating a subject at risk for having Type 1 diabetes are provided. In some embodiments, methods of treating a subject at elevated risk for having Type 1 diabetes are provided.

[0198] In some embodiments, the methods comprise administering a polypeptide, protein, antibody, or pharmaceutical composition as provided for herein to the subject to treat or prevent Type 1 diabetes in the subject. In some embodiments, the composition comprises an effector domain linked to an antibody that binds to MadCAM. In some embodiments, the effector domain is an IL-2 mutein. In some embodiments, the composition comprises a bi-specific molecule that comprises a portion that binds to MAdCAM and another portion that binds to PD-1. In some embodiments, the molecule that binds to PD-1 is a PD-1 agonist. In some embodiments, the portions that bind to MAdCAM and/or PD-1 are antibodies. In some embodiments, the format is an IgG format or a scFv format.

[0199] In some embodiments, methods of delaying the onset of Type 1 diabetes in a subject are provided. In some embodiments, the methods comprise administering a polypeptide, protein, antibody, or pharmaceutical composition as provided for herein to the subject to delay the onset of Type 1 diabetes in the subject. In some embodiments, the composition comprises a bi-specific molecule that comprises a portion that binds to MAdCAM and another portion that binds to PD-1. In some embodiments, the molecule that binds to PD-1 is a PD-1 agonist. In some embodiments, the portions that bind to MAdCAM and/or PD-1 are antibodies. In some embodiments, the format is an IgG format or a scFv format. In some embodiments, the subject is at risk for developing Type 1 diabetes.

[0200] In some embodiments, methods of delaying, reducing, treating, or preventing hyperglycemia in a subject are provided. In some embodiments, the methods comprise administering a polypeptide, protein, antibody, or pharmaceutical composition as provided for herein to the subject to delay, reduce, treat, or prevent hyperglycemia in the subject. In some embodiments, the composition comprises a bi-specific molecule that comprises a portion that binds to MAdCAM and another portion that binds to PD-1. In some embodiments, the molecule that binds to PD-1 is a PD-1 agonist. In some embodiments, the portions that bind to MAdCAM and/or PD-1 are antibodies. In some embodiments, the format is an IgG format or a scFv format. In some embodiments, the subject is a subject having, at risk, or elevated risk, for having Type 1 diabetes or hyperglycemia.

[0201] As provided for herein, in some embodiments the PD-1 agonist is replaced with an IL-2 mutein, such as those provided for herein.

### Therapeutic Compounds

[0202] A therapeutic compound comprises a specific targeting moiety functionally associated with an effector binding/modulating moiety. The targeting moiety can be one that, for example, binds to MAdCAM. In some embodiments, the effector moiety is a PD-1 agonist or an IL-2 mutein. In some embodiments, the specific targeting moiety and effector binding/modulating moiety are linked to one another by a covalent or noncovalent bond, e.g., a covalent or non-covalent bond directly linking the one to the other. In other embodiments, a specific targeting moiety and effector binding/modulating moiety are linked, e.g., covalently or noncovalently, through a linker moiety. E.g., in the case of a fusion polypeptide, a polypeptide sequence comprising the specific targeting moiety and a polypeptide sequence can be directly linked to one another or linked through one or more linker sequences. In some embodiments, the linker moiety comprises a polypeptide. Linkers are not, however, limited to polypeptides. In some embodiments, a linker moiety comprises other backbones, e.g., a non-peptide polymer, e.g., a PEG polymer. In some embodiments, a linker moiety can comprise a particle, e.g., a nanoparticle, e.g., a polymeric nanoparticle. In some embodiments, a linker moiety can comprise a branched molecule, or a dendrimer. However, in embodiments where the effector binding/modulating moiety comprises an ICIM binding/modulating moiety (which binds an effector like PD-1) structures that result in clustering in the absence of target binding should be avoided as they may cause clustering in the absence of target binding. Thus in embodiments, the therapeutic compound has a structure, e.g., the copies of an ICIM are sufficiently limited, such that clustering in the absence of target binding is minimized or substantially eliminated, or eliminated, or is sufficiently minimized that substantial systemic immune suppression does not occur.

[0203] In some embodiments, a therapeutic compound comprises a polypeptide comprising a specific targeting moiety covalently or non-covalently conjugated to an effector binding/modulating moiety. In some embodiments, a therapeutic molecule comprises a fusion protein having comprising a specific targeting moiety fused, e.g., directly or through a linking moiety comprising one or more amino acid residues, to an effector binding/modulating moiety. In some embodiments, a therapeutic molecule comprises a polypeptide comprising a specific targeting moiety linked by a non-covalent bond or a covalent bond, e.g., a covalent bond other than a peptide bond, e.g., a sulfhydryl bond, to an effector binding/modulating moiety.

[0204] In some embodiments, a therapeutic compound comprises polypeptide, e.g., a fusion polypeptide, comprising:
[0205] 1.a) a specific targeting moiety comprising a target specific binding polypeptide;
[0206] 1.b) a specific targeting moiety comprising a target ligand binding molecule;
[0207] 1.c) a specific targeting moiety comprising an antibody molecule;
[0208] 1.d) a specific targeting moiety comprising a single chain antibody molecule, e.g., a scFv domain; or
[0209] 1.e) a specific targeting moiety comprising a first of the light or heavy chain variable region of an antibody molecule, and wherein the other variable region is covalently or non-covalently associated with the first;
[0210] and
[0211] 2.a) an effector binding/modulating moiety comprising an effector specific binding polypeptide;
[0212] 2.b) an effector binding/modulating moiety comprising an effector ligand binding molecule;
[0213] 2.c) an effector binding/modulating moiety comprising an antibody molecule;
[0214] 2.d) an effector binding/modulating moiety comprising a single chain antibody molecule, e.g., a scFv domain; or
[0215] 2.e) an effector binding/modulating moiety comprising a first of the light or heavy chain variable region of an antibody molecule, and wherein the other variable region is covalently or non-covalently associated with the first.

[0216] In some embodiments, a therapeutic compound comprises 1.a and 2.a.

[0217] In some embodiments, a therapeutic compound comprises 1.a and 2.b.

[0218] In some embodiments, a therapeutic compound comprises 1.a and 2.c.

[0219] In some embodiments, a therapeutic compound comprises 1.a and 2.d.

[0220] In some embodiments, a therapeutic compound comprises 1.a and 2.e.

[0221] In some embodiments, a therapeutic compound comprises 1.b and 2.a.

[0222] In some embodiments, a therapeutic compound comprises 1.b and 2.b.

[0223] In some embodiments, a therapeutic compound comprises 1.b and 2.c.

[0224] In some embodiments, a therapeutic compound comprises 1.b and 2.d.

[0225] In some embodiments, a therapeutic compound comprises 1.b and 2.e.

[0226] In some embodiments, a therapeutic compound comprises 1.c and 2.a.

[0227] In some embodiments, a therapeutic compound comprises 1.c and 2.b.

[0228] In some embodiments, a therapeutic compound comprises 1.c and 2.c.

[0229] In some embodiments, a therapeutic compound comprises 1.c and 2.d.

[0230] In some embodiments, a therapeutic compound comprises 1.c and 2.e.

[0231] In some embodiments, a therapeutic compound comprises 1.d and 2.a.

[0232] In some embodiments, a therapeutic compound comprises 1.d and 2.b.

[0233] In some embodiments, a therapeutic compound comprises 1.d and 2.c.

[0234] In some embodiments, a therapeutic compound comprises 1.d and 2.d.

[0235] In some embodiments, a therapeutic compound comprises 1.d and 2.e.

[0236] In some embodiments, a therapeutic compound comprises 1.e and 2.a.

[0237] In some embodiments, a therapeutic compound comprises 1.e and 2.b.

[0238] In some embodiments, a therapeutic compound comprises 1.e and 2.c.

[0239] In some embodiments, a therapeutic compound comprises 1.e and 2.d.

[0240] In some embodiments, a therapeutic compound comprises 1.e and 2.e.

[0241] Therapeutic compounds disclosed herein can, for example, comprise a plurality of effector binding/modulating and specific targeting moieties. Any suitable linker or platform can be used to present the plurality of moieties. The linker is typically coupled or fused to one or more effector binding/modulating and targeting moieties.

[0242] In some embodiments, two (or more) linkers associate, either covalently or non-covalently, e.g., to form a hetero or homo-dimeric therapeutic compound. E.g., the linker can comprise an Fc region and two Fc regions associate with one another. In some embodiments of a therapeutic compound comprising two linker regions, the linker regions can self-associate, e.g., as two identical Fc regions. In some embodiments of a therapeutic compound comprising two linker regions, the linker regions are not capable of, or not capable of substantial, self-association, e.g., the two Fc regions can be members of a knob and hole pair.

[0243] Non-limiting exemplary configurations of therapeutic compounds comprise the following (e.g., in N to C terminal order):
[0244] R1-Linker Region A-R2
[0245] R3-Linker Region B-R4,
   wherein,
[0246] R1, R2, R3, and R4, each independently comprises an effector binding/modulating moiety, e.g., an ICIM binding/modulating moiety, an IIC binding/modulating moiety, ICSM binding/modulating moiety, or an SM binding/modulating moiety; a specific targeting moiety; or is absent, provided that at least one of R1 and R2 is not absent, and at least one of R3 and R4 is not absent;
[0247] Linker Region A and Linker B comprise moieties that can associate with one another, e.g., Linker A and Linker B each comprises an Fc moiety provided that an effector binding/modulating moiety and a specific targeting moiety are present.

[0248] In some embodiments:
[0249] R1 comprises an effector binding/modulating moiety, e.g., an ICIM binding/modulating moiety, an IIC binding/modulating moiety, ICSM binding/modulating moiety, or an SM binding/modulating moiety, or is absent;
[0250] R2 comprises a specific targeting moiety, or is absent;
[0251] R3 comprises an effector binding/modulating moiety, e.g., an ICIM binding/modulating moiety, an IIC binding/modulating moiety, ICSM binding/modulating moiety, or an SM binding/modulating moiety, or is absent;
[0252] R4 comprises a specific targeting moiety, or is absent;
[0253] Linker Region A and Linker B comprise moieties that can associate with one another, e.g., Linker A and Linker B each comprises an Fc moiety, provided that one of R1 or R3 is present and one of R2 or R4 is present.

[0254] In some embodiments:
[0255] R1 comprises a specific targeting moiety, or is absent;
[0256] R2 comprises an effector binding/modulating moiety, e.g., an ICIM binding/modulating moiety, an IIC binding/modulating moiety, ICSM binding/modulating moiety, or an SM binding/modulating moiety, or is absent;
[0257] R3 comprises a specific targeting moiety, or is absent;
[0258] R4 comprises an effector binding/modulating moiety, e.g., an ICIM binding/modulating moiety, an IIC binding/modulating moiety, ICSM binding/modulating moiety, or an SM binding/modulating moiety, or is absent;
[0259] Linker Region A and Linker B comprise moieties that can associate with one another, e.g., Linker A and Linker B each comprises an Fc moiety, provided that one of R1 or R3 is present and one of R2 or R4 is present.

[0260] Non-limiting examples include, but are not limited to:

| | Linker | | | Linker | | |
|---|---|---|---|---|---|---|
| R1 | Region A | R2 | R3 | Region B | R4 | Other |
| HCVR and | Fc Region | scFv | HCVR | Fc Region | scFv | Self-Pairing |
| LCVR | | | and | | | Linker Regions |
| | | | LCVR | | | |
| HCVR and | Fc Region | scFv | HCVR | Fc Region | scFv | Non-Self |
| LCVR | | | and | | | Pairing linker |
| | | | LCVR | | | regions |
| HCVR and | Fc Region | scFv | HCVR | Fc Region | scFv | Self-Pairing |
| LCVR (or | | | and | | | Linker Regions |
| absent) | | | LCVR | | | One of R1 or |
| | | | (or | | | R3 is absent. |
| | | | absent) | | | |
| HCVR and | Fc Region | scFv | HCVR | Fc Region | scFv | Non-Self |
| LCVR (or | | | and | | | Pairing Linker |
| absent) | | | LCVR | | | Regions |
| | | | (or | | | One of R1 or |
| | | | absent) | | | R3 is absent. |
| HCVR and | Fc Region | scFv (or | HCVR | Fc Region | scFv (or | Self-Pairing |
| LCVR | | absent) | and | | absent) | linker regions |
| | | | LCVR | | | One of R2 or |
| | | | | | | R4 is absent. |
| HCVR and | Fc Region | scFv (or | HCVR | Fc Region | scFv (or | Non-Self |
| LCVR | | absent) | and | | absent) | Pairing linker |
| | | | LCVR | | | regions |
| | | | | | | One of R2 or |
| | | | | | | R4 is absent. |
| HCVR and | Fc Region | scFv | HCVR | Fc Region | scFv | Self-Pairing |
| LCVR | | | and | | | Linker Regions |
| | | | LCVR | | | R1 and R3 are |
| | | | | | | the same |
| HCVR and | Fc Region | scFv | HCVR | Fc Region | scFv | Non-Self |
| LCVR | | | and | | | Pairing linker |
| | | | LCVR | | | regions |
| | | | | | | R1and R3 are |
| | | | | | | different |
| HCVR and | Fc Region | scFv | HCVR | Fc Region | scFv | Self-Pairing |
| LCVR | | | and | | | Linker Regions |
| | | | LCVR | | | R2 and R4 are |
| | | | | | | the same |
| HCVR and | Fc Region | scFv | HCVR | Fc Region | scFv | Non-Self |
| LCVR | | | and | | | Pairing linker |
| | | | LCVR | | | regions |
| | | | | | | R2and R4 are |
| | | | | | | different |

HCVR and LCVR: refers to a moiety comprising an antigen binding portion of a heavy and light chain variable region, typically with the heavy chain fused to the Linker region.
Self-pairing: wherein a liker region can pair with itself, e.g., an Fc region that can pair a copy of itself.
Non-Self Pairing: wherein a Linker Region does not pair with itself, or does not substantially pair with itself, e.g., an Fc region does not or does not significantly pair with itself, e.g., wherein Linker Region A and Linker Region B are members of a knob and hole pair.

[0261] In some embodiments:
[0262] R1, R2, R3 and R4 each independently comprise: an effector binding modulating moiety that activates an inhibitory receptor on an immune cell, e.g., a T cell or a B cell, e.g., a PD-L1 molecule or a functional anti-PD-1 antibody molecule (an agonist of PD-1); a specific targeting moiety; or is absent, provided that at least one of R1 and R2 is not absent, and at least one of R3 and R4 is not absent;
[0263] provided that an effector binding moiety and a specific targeting moiety are present.

[0264] In some embodiments, Linker A and Linker B comprise Fc moieties (e.g., self-pairing Fc moieties).

[0265] In some embodiment:
[0266] R1 and R3 independently comprise an effector binding modulating moiety that activates an inhibitory receptor on an immune cell, e.g., a T cell or a B cell, e.g., a PD-L1 molecule or a functional anti-PD-1 antibody molecule (an agonist of PD-1); and
[0267] R2 and R4 independently comprise specific targeting moieties, e.g., scFv molecules against a tissue antigen.

[0268] In some embodiments, Linker A and Linker B comprise Fc moieties (e.g., self-pairing Fc moieties).

[0269] In some embodiments:
[0270] R1 and R3 independently comprise a functional anti-PD-1 antibody molecule (an agonist of PD-1); and
[0271] R2 and R4 independently comprise specific targeting moieties, e.g., scFv molecules against a tissue antigen.

[0272] In some embodiments, Linker A and Linker B comprise Fc moieties (e.g., self-pairing Fc moieties).

[0273] In some embodiments:
[0274] R1 and R3 independently comprise specific targeting moieties, e.g., an anti-tissue antigen antibody; and
[0275] R2 and R4 independently comprise a functional anti-PD-1 antibody molecule (an agonist of PD-1), e.g., an scFv molecule.

[0276] In some embodiments, Linker A and Linker B comprise Fc moieties (e.g., self-pairing Fc moieties).

[0277] In some embodiment:
[0278] R1 and R3 independently comprise a PD-L1 molecule (an agonist of PD-1); and
[0279] R2 and R4 independently comprise specific targeting moieties, e.g., scFv molecules against a tissue antigen; and

[0280] In some embodiments, Linker A and Linker B comprise Fc moieties (e.g., self-pairing Fc moieties).

[0281] In some embodiment:
[0282] R1 and R3 independently comprise specific targeting moieties, e.g., an anti-tissue antigen antibody; and
[0283] R2 and R4 independently comprise a PD-L1 molecule (an agonist of PD-1).

[0284] In some embodiments, Linker A and Linker B comprise Fc moieties (e.g., self-pairing Fc moieties).

[0285] In some embodiment:
[0286] R1, R2, R3 and R4 each independently comprise: an SM binding/modulating moiety which modulates, e.g., binds and inhibits, sequesters, degrades or otherwise neutralizes a substance, e.g., a soluble molecule that modulates an immune response, e.g., PD-1 agonist or IL-2 mutein, or is absent, provided that at least one of R1 and R2 is not absent, and at least one of R3 and R4 is not absent;
[0287] provided that an SM binding/modulating moiety and a specific targeting moiety are present.

[0288] In some embodiments, Linker A and Linker B comprise Fc moieties (e.g., self-pairing Fc moieties or Fc moieties that do not, or do not substantially self-pair).

[0289] In some embodiment:
[0290] R1 and R3 independently comprise an SM binding/modulating moiety which modulates, e.g., binds and inhibits, sequesters, degrades or otherwise neutralizes a substance, e.g., PD-1 agonist or IL-2 mutein; and
[0291] R2 and R4 independently comprise specific targeting moieties, e.g., scFv molecules against a tissue antigen, such as, MAdCAM.

[0292] In some embodiments, Linker A and Linker B comprise Fc moieties (e.g., self-pairing Fc moieties or Fc moieties that do not, or do not substantially self-pair).

[0293] In some embodiment:
[0294] R1 and R3 independently comprise a PD-1 agonist, IL-2 mutein, CD39 molecule or a CD73 molecule; and
[0295] R2 and R4 independently comprise specific targeting moieties, e.g., scFv molecules against a tissue antigen, such as, MAdCAM.

[0296] In some embodiments, Linker A and Linker B comprise Fc moieties (e.g., self-pairing Fc moieties or Fc moieties that do not, or do not substantially self-pair).

[0297] In some embodiment:
[0298] R1 and R3 each comprises a PD-1 agonist, IL-2 mutein, or CD39 molecule; and
[0299] R2 and R4 independently comprise specific targeting moieties, e.g., scFv molecules against a tissue antigen, such as, MAdCAM.

[0300] In some embodiments, Linker A and Linker B comprise Fc moieties (e.g., self-pairing Fc moieties or Fc moieties that do not, or do not substantially self-pair).

[0301] In an embodiment:
[0302] R1, R2, R3 and R4 each independently comprise: an IL-2 mutein molecule; a specific targeting moiety; or is absent, provided that at least one of R1 and R2 is not absent, and at least one of R3 and R4 is not absent;
[0303] provided that an IL-2 mutein molecule and a specific targeting moiety (e.g., one that binds to MAdCAM) are present.

[0304] In an embodiment Linker A and Linker B comprise Fc moieties (e.g., self-pairing Fc moieties or Fc moieties that do not, or do not substantially self-pair). As provided for herein and throughout, in some embodiments, the targeting moiety is an anti-MAdCAM antibody.

[0305] In an embodiment:
[0306] R1 and R3 each comprise an IL-2 mutein molecule; and
[0307] R2 and R4 independently comprise specific targeting moieties, e.g., scFv molecules against a tissue antigen.

[0308] In an embodiment Linker A and Linker B comprise Fc moieties (e.g., self-pairing Fc moieties or Fc moieties that do not, or do not substantially self-pair).

### Linker Regions

[0309] As discussed elsewhere herein specific targeting and effector binding/modulating moieties can be linked by linker regions. Any linker region described herein can be used as a linker. For example, linker Regions A and B can comprise Fc regions. In some embodiments, a therapeutic compound comprises a Linker Region that can self-associate. In some embodiments, a therapeutic compound comprises a Linker Region that has a moiety that minimizes self-association, and typically Linker Region A and Linker Region B are heterodimers. Linkers also include glycine/serine linkers. In some embodiments, the linker can comprise one or more repeats of GGGGS (SEQ ID NO: 23). In some embodiments, the linker comprises 1, 2, 3, 4, or 5 repeats of SEQ ID NO: 23 (repeats disclosed as SEQ ID NO: 1549). In some embodiments, the linker comprises or GGGGSGGGGSGGGGSGGGGS (SEQ ID NO: 22) GGGGSGGGGSGGGGS (SEQ ID NO: 30). These linkers can be used in any of the therapeutic compounds or compositions provided herein.

[0310] The linker region can comprise a Fc region that has been modified (e.g. mutated) to produce a heterodimer. In some embodiments, the CH3 domain of the Fc region can be mutated. Examples of such Fc regions can be found in, for example, U.S. Pat. No. 9,574,010, which is hereby incorporated by reference in its entirety. The Fc region as defined herein comprises a CH3 domain or fragment thereof, and may additionally comprise one or more addition constant region domains, or fragments thereof, including hinge, CH1, or CH2. It will be understood that the numbering of the Fc amino acid residues is that of the EU index as in Kabat et al., 1991, NIH Publication 91-3242, National Technical Information Service, Springfield, Va. The “EU index as set forth in Kabat” refers to the EU index numbering of the human IgG1 Kabat antibody. For convenience, Table B of U.S. Pat. No. 9,574,010 provides the amino acids numbered according to the EU index as set forth in Kabat of the CH2 and CH3 domain from human IgG1, which is hereby incorporated by reference. Table 1.1 of U.S. Pat. No. 9,574,010 provides mutations of variant Fc heterodimers that can be used as linker regions. Table 1.1 of U.S. Pat. No. 9,574,010 is hereby incorporated by reference.

[0311] In some embodiments, the Linker Region A comprises a first CH3 domain polypeptide and a the Linker Region B comprises a second CH3 domain polypeptide, the first and second CH3 domain polypeptides independently comprising amino acid modifications as compared to a wild-type CH3 domain polypeptide, wherein the first CH3 domain polypeptide comprises amino acid modifications at positions T350, L351, F405, and Y407, and the second CH3 domain polypeptide comprises amino acid modifications at positions T350, T366, K392 and T394, wherein the amino acid modification at position T350 is T350V, T3501, T350L or T350M; the amino acid modification at position L351 is L351Y; the amino acid modification at position F405 is F405A, F405V, F405T or F405S; the amino acid modification at position Y407 is Y407V, Y407A or Y407I; the amino acid modification at position T366 is T366L, T366I, T366V, or T366M, the amino acid modification at position K392 is K392F, K392L or K392M, and the amino acid modification at position T394 is T394W, and wherein the numbering of amino acid residues is according to the EU index as set forth in Kabat.

[0312] In some embodiments, the amino acid modification at position K392 is K392M or K392L. In some embodiments, the amino acid modification at position T350 is T350V. In some embodiments, the first CH3 domain polypeptide further comprises one or more amino acid modifications selected from Q347R and one of S400R or S400E. In some embodiments, the second CH3 domain polypeptide further comprises one or more amino acid modifications selected from L351Y, K360E, and one of N390R, N390D or N390E. In some embodiments, the first CH3 domain polypeptide further comprises one or more amino acid modifications selected from Q347R and one of S400R or S400E, and the second CH3 domain polypeptide further comprises one or more amino acid modifications selected from L351Y, K360E, and one of N390R, N390D or N390E. In some embodiments, the amino acid modification at position T350 is T350V. In some embodiments, the amino acid modification at position F405 is F405A. In some embodiments, the amino acid modification at position Y407 is Y407V. In some embodiments, the amino acid modification at position T366 is T366L or T366I. In some embodiments, the amino acid modification at position F405 is F405A, the amino acid modification at position Y407 is and Y407V, the amino acid modification at position T366 is T366L or T366I, and the amino acid modification at position K392 is K392M or K392L. In some embodiments, the first CH3 domain polypeptide comprises the amino acid modifications T350V, L351Y, S400E, F405V and Y407V, and the second CH3 domain polypeptide comprises the amino acid modifications T350V, T366L, N390R, K392M and T394W. In some embodiments, the first CH3 domain polypeptide comprises the amino acid modifications T350V, L351Y, S400E, F405T and Y407V, and the second CH3 domain polypeptide comprises the amino acid modifications T350V, T366L, N390R, K392M and T394W. In some embodiments, the first CH3 domain polypeptide comprises the amino acid modifications T350V, L351Y, S400E, F405S and Y407V, and the second CH3 domain polypeptide comprises the amino acid modifications T350V, T366L, N390R, K392M and T394W. In some embodiments, the first CH3 domain polypeptide comprises the amino acid modifications T350V, L351Y, S400E, F405A and Y407V, and the second CH3 domain polypeptide comprises the amino acid modifications T350V, L351Y, T366L, N390R, K392M and T394W. In some embodiments, the first CH3 domain polypeptide comprises the amino acid modifications Q347R, T350V, L351Y, S400E, F405A and Y407V, and the second CH3 domain polypeptide comprises the amino acid modifications T350V, K360E, T366L, N390R, K392M and T394W. In some embodiments, the first CH3 domain polypeptide comprises the amino acid modifications T350V, L351Y, S400R, F405A and Y407V, and the second CH3 domain polypeptide comprises the amino acid modifications T350V, T366L, N390D, K392M and T394W. In some embodiments, the first CH3 domain polypeptide comprises the amino acid modifications T350V, L351Y, S400R, F405A and Y407V, and the second CH3 domain polypeptide comprises the amino acid modifications T350V, T366L, N390E, K392M and T394W. In some embodiments, the first CH3 domain polypeptide comprises the amino acid modifications T350V, L351Y, S400E, F405A and Y407V, and the second CH3 domain polypeptide comprises the amino acid modifications T350V, T366L, N390R, K392L and T394W. In some embodiments, the first CH3 domain polypeptide comprises the amino acid modifications T350V, L351Y, S400E, F405A and Y407V, and the second CH3 domain polypeptide comprises the amino acid modifications T350V, T366L, N390R, K392F and T394W.

[0313] In some embodiments, an isolated heteromultimer comprising a heterodimeric CH3 domain comprising a first CH3 domain polypeptide and a second CH3 domain polypeptide, the first CH3 domain polypeptide comprising amino acid modifications at positions F405 and Y407, and the second CH3 domain polypeptide comprising amino acid modifications at positions T366 and T394, wherein: (i) the first CH3 domain polypeptide further comprises an amino acid modification at position L351, and (ii) the second CH3 domain polypeptide further comprises an amino acid modification at position K392, wherein the amino acid modification at position F405 is F405A, F405T, F405S or F405V; and the amino acid modification at position Y407 is Y407V, Y407A, Y407L or Y407I; the amino acid modification at position T394 is T394W; the amino acid modification at position L351 is L351Y; the amino acid modification at position K392 is K392L, K392M, K392V or K392F, and the amino acid modification at position T366 is T366I, T366L, T366M or T366V, wherein the heterodimeric CH3 domain has a melting temperature (Tm) of about 70.degree. C. or greater and a purity greater than about 90%, and wherein the numbering of amino acid residues is according to the EU index as set forth in Kabat.

[0314] In some embodiments, the Linker Region A comprises a first CH3 domain polypeptide and a t Linker Region B comprises a second CH3 domain polypeptide, wherein the first CH3 domain polypeptide comprising amino acid modifications at positions F405 and Y407, and the second CH3 domain polypeptide comprising amino acid modifications at positions T366 and T394, wherein: (i) the first CH3 domain polypeptide further comprises an amino acid modification at position L351, and (ii) the second CH3 domain polypeptide further comprises an amino acid modification at position K392, wherein the amino acid modification at position F405 is F405A, F405T, F405S or F405V; and the amino acid modification at position Y407 is Y407V, Y407A, Y407L or Y407I; the amino acid modification at position T394 is T394W; the amino acid modification at position L351 is L351Y; the amino acid modification at position K392 is K392L, K392M, K392V or K392F, and the amino acid modification at position T366 is T366I, T366L, T366M or T366V, wherein the heterodimeric CH3 domain has a melting temperature (Tm) of about 70 C. or greater and a purity greater than about 90%, and wherein the numbering of amino acid residues is according to the EU index as set forth in Kabat. In some embodiments, the amino acid modification at position F405 is F405A. In some embodiments, the amino acid modification at position T366 is T366I or T366L. In some embodiments, the amino acid modification at position Y407 is Y407V. In some embodiments, the amino acid modification at position F405 is F405A, the amino acid modification at position Y407 is Y407V, the amino acid modification at position T366 is T366I or T366L, and the amino acid modification at position K392 is K392L or K392M. In some embodiments, the amino acid modification at position F405 is F405A, the amino acid modification at position Y407 is Y407V, the amino acid modification at position T366 is T366L, and the amino acid modification at position K392 is K392M. In some embodiments, the amino acid modification at position F405 is F405A, the amino acid modification at position Y407 is Y407V, the amino acid modification at position T366 is T366L, and the amino acid modification at position K392 is K392L. In some embodiments, the amino acid modification at position F405 is F405A, the amino acid modification at position Y407 is Y407V, the amino acid modification at position T366 is T366I, and the amino acid modification at position K392 is K392M. In some embodiments, the amino acid modification at position F405 is F405A, the amino acid modification at position Y407 is Y407V, the amino acid modification at position T366 is T366I, and the amino acid modification at position K392 is K392L. In some embodiments, the first CH3 domain polypeptide further comprises an amino acid modification at position S400 selected from S400D and S400E, and the second CH3 domain polypeptide further comprises the amino acid modification N390R. In some embodiments, the amino acid modification at position F405 is F405A, the amino acid modification at position Y407 is Y405V, the amino acid modification at position 5400 is S400E, the amino acid modification at position T366 is T366L, and the amino acid modification at position K392 is K392M.

[0315] In some embodiments, the modified first and second CH3 domains are comprised by an Fc construct based on a type G immunoglobulin (IgG). The IgG can be an IgG1, IgG2, IgG3 or IgG4.

[0316] Other Linker Region A and Linger Region B comprising variant CH3 domains are described in U.S. Pat. Nos. 9,499,634 and 9,562,109, each of which is incorporated by reference in its entirety.

[0317] A Linker Region A and Linker Region B can be complementary fragments of a protein, e.g., a naturally occurring protein such as human serum albumin. In embodiments, one of Linker Region A and Linker Region B comprises a first, e.g., an N terminal fragment of the protein, e.g., hSA, and the other comprises a second, e.g., a C terminal fragment of the protein, e.g., has. In an embodiment the fragments comprise an N terminal and a C terminal fragment. In an embodiment the fragments comprise two internal fragments. Typically the fragments do not overlap. In an embodiment the First and second fragment, together, provide the entire sequence of the original protein, e.g., hSA. The first fragment provides a N terminus and a C terminus for linking, e.g., fusing, to other sequences, e.g., sequences of R1, R2, R3, or R4 (as defined herein).

[0318] The Linker Region A and the Linker Region B can be derived from albumin polypeptide. In some embodiments, the albumin polypeptide is selected from native human serum albumin polypeptide and human alloalbumin polypeptide. The albumin polypeptide can be modified such that the Linker Region A and Linker Region B interact with one another to form heterodimers. Examples of modified albumin polypeptides are described in U.S. Pat. Nos. 9,388,231 and 9,499,605, each of which is hereby incorporated by reference in its entirety. Accordingly, provided herein are multifunctional heteromultimer proteins of the formula R1 Linker Region A-R2 and R3-Linker Region B-R4, wherein the Linker Region A and Linker Region B form a heteromultimer. In some embodiments, the Linker Region A comprises a first polypeptide and the Linker Region B comprises a second polypeptide; wherein each of said first and second polypeptides comprises an amino acid sequence comprising a segment of an albumin polypeptide selected from native human serum albumin polypeptide and human alloalbumin polypeptide; wherein said first and second polypeptides are obtained by segmentation of said albumin polypeptide at a segmentation site, such that the segmentation results in a deletion of zero to 3 amino acid residues at the segmentation site; wherein said first polypeptide comprises at least one mutation selected from A194C, L198C, W214C, A217C, L331C and A335C, and said second polypeptide comprises at least one mutation selected from L331C, A335C, V343C, L346C, A350C, V455C, and N458C; and wherein said first and second polypeptides self-assemble to form a quasi-native structure of the monomeric form of the albumin polypeptide.

[0319] In some embodiments, the segmentation site resides on a loop of the albumin polypeptide that has a high solvent accessible surface area (SASA) and limited contact with the rest of the albumin structure, b) the segmentation results in a complementary interface between the transporter polypeptides. These segmentation sites are described, for example, in U.S. Pat. No. 9,388,231, which is hereby incorporated by reference in its entirety.

[0320] In some embodiments, the first polypeptide comprises residues 1-337 or residues 1-293 of the albumin polypeptide with one or more of the mutations described herein. In some embodiments, the second polypeptide comprises residues of 342-585 or 304-585 of the albumin polypeptide with one or more of the mutations described herein. In some embodiments, the first polypeptide comprises residues 1-339, 1-300, 1-364, 1-441, 1-83, 1-171, 1-281, 1-293, 1-114, 1-337, or 1-336 of the albumin protein. In some embodiments, the second polypeptide comprises residues 301-585, 365-585, 442-585, 85-585, 172-585, 282-585, or 115-585, 304-585, 340-585, or 342-585 of the albumin protein.

[0321] In some embodiments, the first and second polypeptide comprise the residues of the albumin protein as shown in the table below. The sequence of the albumin protein is described below.

| First Polypeptide Residues | Second Polypeptide Residues |
|---|---|
| 1-300 | 301-585 |
| 1-364 | 365-585 |
| 1-441 | 442-585 |
| 1-83 | 85-585 |
| 1-171 | 172-585 |
| 1-281 | 282-585 |
| 1-114 | 115-585 |
| 1-339 | 340-585 |
| 1-337 | 342-585 |
| 1-293 | 304-585 |
| 1-336 | 342-585 |

[0322] In some embodiments, the first and second polypeptides comprise a linker that can form a covalent bond with one another, such as a disulfide bond. A non-limiting example of the linker is a peptide linker. In some embodiments, the peptide linker comprises GGGGS (SEQ ID NO: 23). The linker can be fused to the C-terminus of the first polypeptide and the N-terminus of the second polypeptide. The linker can also be used to attach the moieties described herein without abrogating the ability of the linkers to form a disulfide bond. In some embodiments, the first and second polypeptides do not comprise a linker that can form a covalent bond. In some embodiments, the first and second polypeptides have the following substitutions.

| First Polypeptide Substitution | Second Polypeptide Substitution |
|---|---|
| A217C | V343C |
| L331C | A350C |
| A217C | L346C |
| W214C | V343C |
| A335C | L346C |
| L198C | V455C |
| A217C | A335C |
| A217C | L331C |
| L198C | N458C |
| A194C | V455C |

[0323] The sequence of the albumin polypeptide can be The sequence of human albumin is as shown, in the post-protein form with the N-terminal signaling residues removed

(MKWVTFISLLFLFSSAYSRGVFRR SEQ ID NO: 1533)
(human albumin, SEQ ID NO: 42)
[sequence omitted]

[0324] In some embodiments, the Linker Region A and the Linker Region B form a heterodimer as described herein.

[0325] In some embodiments, the polypeptide comprises at the N-terminus an antibody comprised of F(ab′)2 on an IgG1 Fc backbone fused with scFvs on the C-terminus of the IgG Fc backbone. In some embodiments, the IgG Fc backbone is a IgG1 Fc backbone. In some embodiments, the IgG1 backbone is replaced with a IgG4 backbone, IgG2 backbone, or other similar IgG backbone. The IgG backbones described in this paragraph can be used throughout this application where a Fc region is referred to as part of the therapeutic compound. Thus, in some embodiments, the antibody comprised of F(ab′)2 on an IgG1 Fc backbone can be an anti-MAdCAM antibody or an anti-PD-1 antibody on an IgG1 Fc or any other targeting moiety or effector binding/modulating moiety provided herein. In some embodiments, the scFV segments fused to the C-terminus could be an anti-PD-1 antibody, if the N-terminus region is an anti-MAdCAM antibody, or anti-MAdCAM antibody, if the N-terminus region is an anti-PD-1 antibody. In this non-limiting example, the N-terminus can be the targeting moiety, such as any one of the ones provided for herein, and the C-terminus can be the effector binding/modulating moiety, such as any of the ones provided for herein. Alternatively, in some embodiments, the N-terminus can be the effector binding/modulating moiety, such as any one of the ones provided for herein, and the C-terminus can be the targeting moiety, such as any of the ones provided for herein.

[0326] In some embodiments, the N-terminus can be the targeting moiety, such as any one of the ones provided for herein, and the C-terminus can be the effector binding/modulating moiety, such as any of the ones provided for herein.

[0327] In some embodiments, the therapeutic compound comprises two polypeptides that homodimerize. In some embodiments, the N-terminus of the polypeptide comprises an effector binding/modulating moiety that is fused to a human IgG1 Fe domain (e.g. CH2 and/or CH3 domains). In some embodiments, the C-terminus of the Fe domain is another linker that is fused to the targeting moiety. Thus, in some embodiments, the molecule could be represented using the formula of R1-Linker A-Fc Region-Linker B-R2, wherein R1 can be an effector binding/modulating moiety, R2 is a targeting moiety, Linker A and Linker B are independently linkers as provided for herein. In some embodiments, Linker 1 and Linker 2 are different.

[0328] In some embodiments, the molecule could be represented using the formula of R1-Linker A-Fc Region-Linker B-R2, wherein R1 can be a targeting moiety, R2 is an effector binding/modulating moiety, Linker A and Linker B are independently linkers as provided for herein. In some embodiments, Linker A and Linker B are different. The linkers can be chosen from the non-limiting examples provided for herein. In some embodiments, R1 and R2 are independently selected from F(ab′)2 and scFV antibody domains. In some embodiments, R1 and R2 are different antibody domains. In some embodiments, the scFV is in the VL-VH domain orientation.

[0329] In some embodiments, the therapeutic compound is a bispecific antibody. In some embodiments, the bispecific antibodies are comprised of four polypeptide chains comprising the following:
[0330] Chain 1: nt-VH1-CH1-CH2-CH3-Linker A-scFv[VL2-Linker B-VH2]-ct
[0331] Chain 2: nt-VH1-CH1-CH2-CH3-Linker A-scFv[VL2-Linker B-VH2]-ct
[0332] Chain 3: nt-VL1-CL-ct
[0333] Chain 4: nt-VL1-CL-ct,
[0334] wherein chains 1 and 2 are identical to each other, and chains 3 and 4 are identical to each other,
[0335] wherein chain 1 forms a homodimer with chain 2; and chain 3 and 4 associate with chain 1 and chain 2. That is, when each light chain associates with each heavy chain, VL1 associates with VH1 and CL associates with CH1 to form two functional Fab units. Without being bound to any particular theory, each scFv unit is intrinsically functional since VL2 and VH2 are covalently linked in tandem with a linker as provided herein (e.g. GGGGS (SEQ ID NO: 23), GGGGSGGGGSGGGGSGGGGS (SEQ ID NO: 22), or GGGGSGGGGSGGGGS (SEQ ID NO: 30). The sequences of Linker A and Linker B, which are independent of one another can be the same or different and as otherwise described throughout the present application. Thus, in some embodiments, Linker A comprises GGGGS (SEQ ID NO: 23), or two repeats thereof, GGGGSGGGGSGGGGS (SEQ ID NO: 30), or GGGGSGGGGSGGGGSGGGGS (SEQ ID NO: 22). In some embodiments, Linker B comprises GGGGS (SEQ ID NO: 23), or two repeats thereof, GGGGSGGGGSGGGGS (SEQ ID NO: 30), or GGGGSGGGGSGGGGSGGGGS (SEQ ID NO: 22). The scFv may be arranged in the NT-VH2-VL2-CT or NT-VL2-VH2-CT orientation. NT or nt stands for N-terminus and CT or ct stands for C-terminus of the protein. CH1, CH2, and CH3 are the domains from the IgG Fc region, and CL stands for Constant Light chain, which can be either kappa or lambda family light chains. The other definitions stand for the way they are normally used in the art.

[0336] In some embodiments, the VH1 and VL1 domains are derived from the effector molecule and the VH2 and VL2 domains are derived from the targeting moiety. In some embodiments the VH1 and VL1 domains are derived from a targeting moiety and the VH2 and VL2 domains are derived from an effector binding/modulating moiety.

[0337] In some embodiments, the VH1 and VL1 domains are derived from an anti-PD-1 antibody, and the VH2 and VL2 domains are derived from an anti-MAdCAM antibody. In some embodiments the VH1 and VL1 domains are derived from an anti-MAdCAM antibody and the VH2 and VL2 domains are derived from an anti-PD-1 antibody.

[0338] In some embodiments, Linker A comprises 1, 2, 3, 4, or 5 GGGGS (SEQ ID NO: 23) repeats (repeats disclosed as SEQ ID NO: 1549). In some embodiments, Linker B comprises 1, 2, 3, 4, or 5 GGGGS (SEQ ID NO: 23) repeats (repeats disclosed as SEQ ID NO: 1549). For the avoidance of doubt, the sequences of Linker A and Linker B, which are used throughout this application, are independent of one another. Therefore, in some embodiments, Linker A and Linker B can be the same or different. In some embodiments, Linker A comprises GGGGS (SEQ ID NO: 23), or two repeats thereof, GGGGSGGGGSGGGGS (SEQ ID NO: 30), or GGGGSGGGGSGGGGSGGGGS (SEQ ID NO: 22). In some embodiments, Linker B comprises GGGGS (SEQ ID NO: 23), or two repeats thereof, GGGGSGGGGSGGGGS (SEQ ID NO: 30), or GGGGSGGGGSGGGGSGGGGS (SEQ ID NO: 22).

[0339] In some embodiments, the therapeutic compound comprises a light chain and a heavy chain. In some embodiments, the light and heavy chain begin at the N-terminus with the VH domain of a targeting moiety followed by the CH1 domain of a human IgG1, which is fused to a Fc region (e.g. CH2-CH3) of human IgG1. In some embodiments, at the c-terminus of the Fc region is fused to a linker as provided herein, such as but not limited to, GGGGS (SEQ ID NO: 23), or two or three repeats thereof, or GGGGSGGGGSGGGGS (SEQ ID NO: 30). The linker can then be fused to an effector binding/modulating moiety, such as any one of the effector moieties provided for herein. The polypeptides can homodimerize because through the heavy chain homodimerization, which results in a therapeutic compound having two effector moieties, such as two anti-PD-1 antibodies. In this orientation, the targeting moiety is an IgG format, there are two Fab arms that each recognize binding partner of the targeting moiety, for example, MAdCAM being bound by the anti-MAdCAM targeting moiety.

[0340] In some embodiments, the therapeutic or polypeptide comprises a formula of: An antibody (targeting moiety) with a variable heavy chain and a variable light chain, in an IgG isotype, for example, with an effector molecule, such as an IL-2 mutein. In some embodiments, the IL-2 mutein is fused at the c-terminus of the variable heavy chain. This can be represented by the formula of VL and VH-IgGConstantDomain-L1-E, wherein L1 is a linker, such as a glycine/serine linker as provided herein, E is an effector molecule, such as an IL-2 mutein and VL and VH are the variable light and heavy chains. The VL domain can be a kappa domain. In some embodiments, the IgG Constant domain comprises the sequence of:

(SEQ ID NO: 44)
ASTKGPSVFPLAPSSKSTSGGTAALGCLVKDYFPEPVTVSWNSGALTSG
VHTFPAVLQSSGLYSLSSVVTVPSSSLGTQTYICNVNHKPSNTKVDKKV
EPKSCDKTHTCPPCPAPEAAGAPSVFLFPPKPKDTLMISRTPEVTCVVV
DVSHEDPEVKFNWYVDGVEVHNAKTKPREEQYNSTYRVVSVLTVLHQDW
LNGKEYKCKVSNKALPAPIEKTISKAKGQPREPQVYTLPPSREEMTKNQ
VSLTCLVKGFYPSDIAVEWESNGQPENNYKTTPPVLDSDGSFFLYSKLT
VDKSRWQQGNVFSCSVMHEALHNHYTQKSLSLSPG.

[0341] In some embodiments, the linker comprises GGGGS (SEQ ID NO: 23). In some embodiments, the IL-2 mutein comprises the IL-2 muteins provided herein, such as one of SEQ ID NOs: 31-41, which can also have a Fc molecule appended to the N- or C-terminus of the IL-2 mutein. The Fc domain can comprise SEQ ID NO: 21 or 43. In some embodiments, the IL-2 mutein comprises one of SEQ ID NO: 47-60. In some embodiments, the IL-2 mutein comprises SEQ ID NO: 41 or SEQ ID NO: 56. In some embodiments, the IL-2 mutein comprises SEQ ID NO: 40 or SEQ ID NO: 55.

[0342] In some embodiments, the targeting moiety is a MAdCAM antibody.

[0343] In some embodiments, the MAdCAM antibody is selected from the following table

TABLE 6

| Clone | | | | | | | |
|---|---|---|---|---|---|---|---|
| ID | HCDR1 | HCDR2 | HCDR3 | LCDR1 | LCDR2 | LCDR3 | SCFv |
| 1. | FTFS | AVIS | CTTS | QASQDI | AASSLQS | CQQGYSTPLTF | EVQLLESGGGLVQPGGSLRLSCAA |
| | SYGM | DDGS | KYYY | SKSLN | (SEQ ID | (SEQ ID NO: | SGFTFSSYGMHWVRQAPGKGLEWV |
| | H | DKYY | YYGM | SEQ | NO: 65) | 66) | AVISDDGSDKYYADSVKGRFTISR |
| | (SEQ | A | DVW | ID NO: | | | DNSKNTLYLQMNSLRAEDTAVYYC |
| | ID | (SEQ | (SEQ | 64) | | | TTSKYYYYYGMDVWGQGTTVTVSS |
| | NO: | ID | ID | | | | GGGGSGGGGSGGGGSGGGGSDIQM |
| | 61) | NO: | NO: | | | | TQSPSSLSASVGDRVTITCQASQD |
| | | 62) | 63) | | | | ISKSLNWYQQKPGKAPKLLIYAAS |
| | | | | | | | SLQSGVPSRFSGSGSGTDFTLTIS |
| | | | | | | | SLQPEDFATYYCQQGYSTPLTFGG |
| | | | | | | | GTKVEIK (SEQ ID NO: 67) |
| 2. | YPFI | GIIN | CARE | RASQSI | GASTLES | CQQTWGPPFTF | QVQLVQSGAEVKKPGASVKVSCKA |
| | GYYL | PSGG | GRLS | SSYLA | (SEQ ID | (SEQ ID NO: | SGYPFIGYYLHWVRQAPGQGLEWM |
| | H | STSY | YGMD | (SEQ | NO: 72) | 73) | GIINPSGGSTSYAQKFQGRVTMTR |
| | (SEQ | A | AW | ID NO: | | | DTSTSTVYMELSSLRSEDTAVYYC |
| | ID | (SEQ | (SEQ | 71) | | | AREGRLSYGMDAWGQGTLVTVSSG |
| | NO: | ID | ID | | | | GGGSGGGGSGGGGSGGGGSDIQMT |
| | 68) | NO: | NO: | | | | QSPSSLSASVGDRVTITCRASQSI |
| | | 69) | 70) | | | | SSYLAWYQQKPGKAPKLLIYGAST |
| | | | | | | | LESGVPSRFSGSGSGTDFTLTISS |
| | | | | | | | LQPEDFATYYCQQTWGPPFTFGQG |
| | | | | | | | TKLEIK (SEQ ID NO: 74) |
| 3. | YPFI | GIIN | CARE | RASQSI | GASTLES | CQQTWGPPFTF | QVQLVQSGAEVKKPGASVKVSCKA |
| | GQYL | PSGG | GRLS | SSYLA | (SEQ ID | (SEQ ID NO: | SGYPFIGQYLHWVRQAPGQGLEWM |
| | H | STSY | YGMD | (SEQ | NO: 72) | 73) | GIINPSGGSTSYAQKFQGRVTMTR |
| | (SEQ | A | AW | ID NO: | | | DTSTSTVYMELSSLRSEDTAVYYC |
| | ID | (SEQ | (SEQ | 71) | | | AREGRLSYGMDAWGQGTLVTVSSG |
| | NO: | ID | ID | | | | GGGSGGGGSGGGGSGGGGSDIQMT |
| | 75) | NO: | NO: | | | | QSPSSLSASVGDRVTITCRASQSI |
| | | 69) | 70) | | | | SSYLAWYQQKPGKAPKLLIYGAST |
| | | | | | | | LESGVPSRFSGSGSGTDFTLTISS |
| | | | | | | | LQPEDFATYYCQQTWGPPFTFGQG |
| | | | | | | | TKLEIK (SEQ ID NO: 76) |
| 4. | GTFS | GSIN | CAKD | QASQDI | AASSLQS | CQQSYSSVITF | QVQLVQSGAEVKKPGASVKVSCKA |
| | SYAI | PSGD | KAQW | SNSLN | (SEQ ID | (SEQ ID NO: | SGGTFSSYAISWVRQAPGQGLEWM |
| | S | TTSY | LVGY | (SEQ | NO: 65) | 81) | GSINPSGDTTSYAQKFQGRVTMTR |
| | (SEQ | A | FDYW | ID NO: | | | DTSTSTVYMELSSLRSEDTAVYYC |
| | ID | (SEQ | (SEQ | 80) | | | AKDKAQWLVGYFDYWGQGTLVTVS |
| | NO: | ID | ID | | | | SGGGGSGGGGSGGGGSGGGGSDIQ |
| | 77) | NO: | NO: | | | | MTQSPSSLSASVGDRVTITCQASQ |
| | | 78) | 79) | | | | DISNSLNWYQQKPGKAPKLLIYAA |
| | | | | | | | SSLQSGVPSRFSGSGSGTDFTLTI |
| | | | | | | | SSLQPEDFATYYCQQSYSSVITFG |
| | | | | | | | QGTKVEIK (SEQ ID NO: 82) |
| 5. | FTFS | SSIS | CARE | RASQGI | GASSLQS | CQQANSFPFTF | EVQLLESGGGLVQPGGSLRLSCAA |
| | SYWM | PGGS | VQLS | SNSLA | (SEQ ID | (SEQ ID NO: | SGFTFSSYWMHWVRQAPGKGLEWV |
| | H | NIDY | HYDY | (SEQ | NO: 87) | 88) | SSISPGGSNIDYADSVKGRFTISR |
| | (SEQ | A | W | ID NO: | | | DNSKNTLYLQMNSLRAEDTAVYYC |
| | ID | (SEQ | (SEQ | 86) | | | AREVQLSHYDYWGQGTLVTVSSGG |
| | NO: | ID | ID | | | | GGSGGGGSGGGGSGGGGSDIQMTQ |
| | 83) | NO: | NO: | | | | SPSSLSASVGDRVTITCRASQGIS |
| | | 84) | 85) | | | | NSLAWYQQKPGKAPKLLIYGASSL |
| | | | | | | | QSGVPSRFSGSGSGTDFTLTISSL |
| | | | | | | | QPEDFATYYCQQANSFPFTFGQGT |
| | | | | | | | KVEIK (SEQ ID NO: 89) |
| 6. | FTFN | SRIN | CARE | RASQII | GASSLQS | CQQSYRLPFTF | EVQLLESGGGLVQPGGSLRLSCAA |
| | NYAF | SYGT | GPVA | GTNLA | (SEQ ID | (SEQ ID NO: | SGFTENNYAFHWVRQAPGKGLEWV |
| | H | STTY | GYWY | (SEQ | NO: 87) | 94) | SRINSYGTSTTYADSVKGRFTISR |
| | (SEQ | A | FDLW | ID NO: | | | DNSKNTLYLQMNSLRAEDTAVYYC |
| | ID | (SEQ | (SEQ | 93) | | | AREGPVAGYWYFDLWGQGTLVTVS |
| | NO: | ID | ID | | | | SGGGGSGGGGSGGGGSGGGGSDIQ |
| | 90) | NO: | NO: | | | | MTQSPSSLSASVGDRVTITCRASQ |
| | | 91) | 92) | | | | IIGTNLAWYQQKPGKAPKLLIYGA |
| | | | | | | | SSLQSGVPSRFSGSGSGTDFTLTI |
| | | | | | | | SSLQPEDFATYYCQQSYRLPFTFG |
| | | | | | | | QGTKVEIK (SEQ ID NO: 95) |
| 7. | YTFT | GIIN | CAKD | RASQNI | AASSLQS | CQQSYTTPYTF | QVQLVQSGAEVKKPGASVKVSCKA |
| | GYHI | PSGG | WSSW | SSSLN | (SEQ ID | (SEQ ID NO: | SGYTFTGYHIHWVRQAPGQGLEWM |
| | H | STIY | YLGP | (SEQ | NO: 65) | 100) | GIINPSGGSTIYAQKFQGRVTMTR |
| | (SEQ | A | FDYW | ID NO: | | | DTSTSTVYMELSSLRSEDTAVYYC |
| | ID | (SEQ | (SEQ | 99) | | | AKDWSSWYLGPFDYWGQGTLVTVS |
| | NO: | ID | ID | | | | SGGGGSGGGGSGGGGSGGGGSDIQ |
| | 96) | NO: | NO: | | | | MTQSPSSLSASVGDRVTITCRASQ |
| | | 97) | 98) | | | | NISSSLNWYQQKPGKAPKLLIYAA |
| | | | | | | | SSLQSGVPSRFSGSGSGTDFTLTI |
| | | | | | | | SSLQPEDFATYYCQQSYTTPYTFG |
| | | | | | | | QGTKVEIK (SEQ ID NO: |
| | | | | | | | 101) |
| 8. | FMFG | SAIS | CAKD | RASQGI | DASSLES | CQQTHSFPSTF | EVQLLESGGGLVQPGGSLRLSCAA |
| | DYAM | GSGG | LVVA | SNNLN | (SEQ ID | (SEQ ID NO: | SGFMFGDYAMHWVRQAPGKGLEWV |
| | H | STYY | GIWY | (SEQ | NO: | 107) | SAISGSGGSTYYADSVKGRFTISR |
| | (SEQ | A | FDLW | ID NO: | 106) | | DNSKNTLYLQMNSLRAEDTAVYYC |
| | ID | (SEQ | (SEQ | 105) | | | AKDLVVAGIWYFDLWGRGTLVTVS |
| | NO: | ID | ID | | | | SGGGGSGGGGSGGGGSGGGGSDIQ |
| | 102) | NO: | NO: | | | | MTQSPSSLSASVGDRVTITCRASQ |
| | | 103) | 104) | | | | GISNNLNWYQQKPGKAPKLLIYDA |
| | | | | | | | SSLESGVPSRFSGSGSGTDFTLTI |
| | | | | | | | SSLQPEDFATYYCQQTHSFPSTFG |
| | | | | | | | QGTKLEIK (SEQ ID NO: |
| | | | | | | | 108) |
| 9. | FTFS | SVIG | CAAD | RASQGI | AASTLQS | CQQSYSTPWTF | EVQLLESGGGLVQPGGSLRLSCAA |
| | DYYM | ESGG | PVSR | SSSLA | (SEQ ID | (SEQ ID NO: | SGFTFSDYYMNWVRQAPGKGLEWV |
| | N | STYY | WPKH | (SEQ | NO: | 114) | SVIGESGGSTYYADSVKGRFTISR |
| | (SEQ | A | GGGD | ID NO: | 113) | | DNSKNTLYLQMNSLRAEDTAVYYC |
| | ID | (SEQ | YW | 112) | | | AADPVSRWPKHGGGDYWGQGTLVT |
| | NO: | ID | (SEQ | | | | VSSGGGGSGGGGSGGGGSGGGGSD |
| | 109) | NO: | ID | | | | IQMTQSPSSLSASVGDRVTITCRA |
| | | 110) | NO: | | | | SQGISSSLAWYQQKPGKAPKLLIY |
| | | | 111) | | | | AASTLQSGVPSRFSGSGSGTDFTL |
| | | | | | | | TISSLQPEDFATYYCQQSYSTPWT |
| | | | | | | | FGQGTKVEIK (SEQ ID NO: |
| | | | | | | | 115) |
| 10. | YTLT | GWIN | CAKG | RASDNI | AASSLQS | CQQGYSTPPTF | QVQLVQSGAEVKKPGASVKVSCKA |
| | TWYM | PNRG | DLWG | GSWLA | (SEQ ID | (SEQ ID NO: | SGYTLTTWYMYWVRQAPGQGLEWM |
| | Y | ATNY | AMDV | (SEQ | NO: 65) | 120) | GWINPNRGATNYAQKFQGRVTMTR |
| | (SEQ | A | W | ID NO: | | | DTSTSTVYMELSSLRSEDTAVYYC |
| | ID | (SEQ | (SEQ | 119) | | | AKGDLWGAMDVWGQGTLVTVSSGG |
| | NO: | ID | ID | | | | GGSGGGGSGGGGSGGGGSDIQMTQ |
| | 116) | NO: | NO: | | | | SPSSLSASVGDRVTITCRASDNIG |
| | | 117) | 118) | | | | SWLAWYQQKPGKAPKLLIYAASSL |
| | | | | | | | QSGVPSRFSGSGSGTDFTLTISSL |
| | | | | | | | QPEDFATYYCQQGYSTPPTFGQGT |
| | | | | | | | KVEIK (SEQ ID NO: 121) |
| 11. | YTFT | GGFD | CARH | RASESI | AASTLQS | CQQSYSVPFTF | QVQLVQSGAEVKKPGASVKVSCKA |
| | TYYM | PEDG | AVAG | SNWLA | (SEQ ID | (SEQ ID NO: | SGYTFTTYYMHWVRQAPGQGLEWM |
| | H | ETIY | AVGA | (SEQ | NO: | 126) | GGFDPEDGETIYAQKFQGRVTMTR |
| | (SEQ | A | GYYY | ID NO: | 113) | | DTSTSTVYMELSSLRSEDTAVYYC |
| | ID | (SEQ | YGMD | 125) | | | ARHAVAGAVGAGYYYYGMDVWGQG |
| | NO: | ID | VW | | | | TMVTVSSGGGGSGGGGSGGGGSGG |
| | 122) | NO: | (SEQ | | | | GGSDIQMTQSPSSLSASVGDRVTI |
| | | 123) | ID | | | | TCRASESISNWLAWYQQKPGKAPK |
| | | | NO: | | | | LLIYAASTLQSGVPSRFSGSGSGT |
| | | | 124) | | | | DFTLTISSLQPEDFATYYCQQSYS |
| | | | | | | | VPFTFGPGTKVDIK (SEQ ID |
| | | | | | | | NO: 127) |
| 12. | YTFT | GWIG | CARD | RSSQSL | SSSNRAP | CMQALHIPLTF | QVQLVQSGAEVKKPGASVKVSCKA |
| | GYYM | PNSG | LDHN | LHSNGY | (SEQ ID | (SEQ ID NO: | SGYTFTGYYMHWVRQAPGQGLEWM |
| | H | DTNY | WYFD | NYLD | NO: | 133) | GWIGPNSGDTNYAQKFQGRVTMTR |
| | (SEQ | A | LW | (SEQ | 132) | | DTSTSTVYMELSSLRSEDTAVYYC |
| | ID | (SEQ | (SEQ | ID NO: | | | ARDLDHNWYFDLWGRGTLVTVSSG |
| | NO: | ID | ID | 131) | | | GGGSGGGGSGGGGSGGGGSDIVMT |
| | 128) | NO: | NO: | | | | QSPLSLPVTPGEPASISCRSSQSL |
| | | 129 | 130) | | | | LHSNGYNYLDWYLQKPGQSPQLLI |
| | | | | | | | YSSSNRAPGVPDRFSGSGSGTDFT |
| | | | | | | | LKISRVEAEDVGVYYCMQALHIPL |
| | | | | | | | TFGGGTKVEIK (SEQ ID NO: |
| | | | | | | | 134) |
| 13. | FTFD | SYID | CAKD | QASQDI | KASTLES | CQQSYSTPITF | EVQLLESGGGLVQPGGSLRLSCAA |
| | DYAM | ASGT | QAAA | SNYLN | (SEQ ID | (SEQ ID NO: | SGFTFDDYAMHWVRQAPGKGLEWV |
| | H | TIYY | GYWY | (SEQ | NO: | 140) | SYIDASGTTIYYADSVKGRFTISR |
| | (SEQ | A | FDLW | ID NO: | 139 | | DNSKNTLYLQMNSLRAEDTAVYYC |
| | ID | (SEQ | (SEQ | 138) | | | AKDQAAAGYWYFDLWGRGTLVTVS |
| | NO: | ID | ID | | | | SGGGGSGGGGSGGGGSGGGGSDIQ |
| | 135) | NO: | NO: | | | | MTQSPSSLSASVGDRVTITCQASQ |
| | | 136) | 137) | | | | DISNYLNWYQQKPGKAPKLLIYKA |
| | | | | | | | STLESGVPSRFSGSGSGTDFTLTI |
| | | | | | | | SSLQPEDFATYYCQQSYSTPITFG |
| | | | | | | | QGTRLEIK (SEQ ID NO: |
| | | | | | | | 141) |
| 14. | YTFT | GGIV | CAKD | RSSQSL | SAYNRAS | CMQALQTPLTF | QVQLVQSGAEVKKPGSSVKVSCKA |
| | DYHI | PRSG | ESSG | LHSNGY | (SEQ ID | (SEQ ID NO: | SGYTFTDYHIHWVRQAPGQGLEWM |
| | H | STTY | WYYF | NYLD | NO: | 146) | GGIVPRSGSTTYAQKFQGRVTITA |
| | (SEQ | A | DYW | (SEQ | 145) | | DESTSTAYMELSSLRSEDTAVYYC |
| | ID | (SEQ | (SEQ | ID NO: | | | AKDESSGWYYFDYWGQGTLVTVSS |
| | NO: | ID | ID | 131) | | | GGGGSGGGGSGGGGSGGGGSDIVM |
| | 142) | NO: | NO: | | | | TQSPLSLPVTPGEPASISCRSSQS |
| | | 143) | 144) | | | | LLHSNGYNYLDWYLQKPGQSPQLL |
| | | | | | | | IYSAYNRASGVPDRFSGSGSGTDF |
| | | | | | | | TLKISRVEAEDVGVYYCMQALQTP |
| | | | | | | | LTFGQGTKVEIK (SEQ ID NO: |
| | | | | | | | 147) |
| 15. | YTFT | GGII | CAKG | QANQDI | RASKLEA | CQQSSEIPYSF | QVQLVQSGAEVKKPGSSVKVSCKA |
| | NYYM | PIVD | RYTV | SNYLN | (SEQ ID | (SEQ ID NO: | SGYTFTNYYMHWVRQAPGQGLEWM |
| | H | RVKY | NYYY | (SEQ | NO: | 153) | GGIIPIVDRVKYAQKFQGRVTITA |
| | (SEQ | A | GMDV | ID NO: | 152) | | DESTSTAYMELSSLRSEDTAVYYC |
| | ID | (SEQ | W | 151) | | | AKGRYTVNYYYGMDVWGQGTTVTV |
| | NO: | ID | (SEQ | | | | SSGGGGSGGGGSGGGGSGGGGSDI |
| | 148) | NO: | ID | | | | QMTQSPSSLSASVGDRVTITCQAN |
| | | 149) | NO: | | | | QDISNYLNWYQQKPGKAPKLLIYR |
| | | | 150) | | | | ASKLEAGVPSRFSGSGSGTDFTLT |
| | | | | | | | ISSLQPEDFATYYCQQSSEIPYSF |
| | | | | | | | GQGTKLEIK (SEQ ID NO: |
| | | | | | | | 154) |
| 16. | FTFE | SYLN | CAKD | RASQSI | DASNLET | CQQSYTIPITF | EVQLLESGGGLVQPGGSLRLSCAA |
| | DYAM | SDGG | YCTN | STYLN | (SEQ ID | (SEQ ID NO: | SGFTFEDYAMHWVRQAPGKGLEWV |
| | H | STSY | GVCA | (SEQ | NO: | 160) | SYLNSDGGSTSYADSVKGRFTISR |
| | (SEQ | A | FDYW | ID NO: | 159) | | DNSKNTLYLQMNSLRAEDTAVYYC |
| | ID | (SEQ | (SEQ | 158) | | | AKDYCTNGVCAFDYWGQGTLVTVS |
| | NO: | ID | ID | | | | SGGGGSGGGGSGGGGSGGGGSDIQ |
| | 155) | NO: | NO: | | | | MTQSPSSLSASVGDRVTITCRASQ |
| | | 156) | 157) | | | | SISTYLNWYQQKPGKAPKLLIYDA |
| | | | | | | | SNLETGVPSRFSGSGSGTDFTLTI |
| | | | | | | | SSLQPEDFATYYCQQSYTIPITFG |
| | | | | | | | QGTRLEIK (SEQ ID NO: |
| | | | | | | | 161) |
| 17. | FTFS | SAIS | CVSD | RASQSI | AASRLEG | CQQANSFPLTF | EVQLLESGGGLVQPGGSLRLSCAA |
| | DSAM | GSGS | IAVA | STFLN | (SEQ ID | (SEQ ID NO: | SGFTFSDSAMHWVRQAPGKGLEWV |
| | H | TIYY | GHWY | (SEQ | NO: | 167) | SAISGSGSTIYYADSVKGRFTISR |
| | (SEQ | A | FDLW | ID NO: | 166) | | DNSKNTLYLQMNSLRAEDTAVYYC |
| | ID | (SEQ | (SEQ | 165) | | | VSDIAVAGHWYFDLWGRGTLVTVS |
| | NO: | ID | ID | | | | SGGGGSGGGGSGGGGSGGGGSDIQ |
| | 162) | NO: | NO: | | | | MTQSPSSLSASVGDRVTITCRASQ |
| | | 163) | 164) | | | | SISTFLNWYQQKPGKAPKLLIYAA |
| | | | | | | | SRLEGGVPSRFSGSGSGTDFTLTI |
| | | | | | | | SSLQPEDFATYYCQQANSFPLTFG |
| | | | | | | | PGTKVDIK (SEQ ID NO: |
| | | | | | | | 168) |
| 18. | FTFS | SYIS | CARA | RASQSI | AASSLQS | CQQSYSTPLTF | EVQLVESGGGLVKPGGSLRLSCAA |
| | SYWM | GDSG | NSSG | SSYLN | (SEQ ID | (SEQ ID NO: | SGFTFSSYWMSWVRQAPGKGLEWV |
| | S | YTNY | WYDW | (SEQ | NO: 65) | 173) | SYISGDSGYTNYAAPVKGRFTISR |
| | (SEQ | A | YFDL | ID NO: | | | DDSKNTLYLQMNSLKTEDTAVYYC |
| | ID | (SEQ | W | 172) | | | ARANSSGWYDWYFDLWGRGTLVTV |
| | NO: | ID | (SEQ | | | | SSGGGGSGGGGSGGGGSGGGGSDI |
| | 169) | NO: | ID | | | | QMTQSPSSLSASVGDRVTITCRAS |
| | | 170) | NO: | | | | QSISSYLNWYQQKPGKAPKLLIYA |
| | | | 171) | | | | ASSLQSGVPSRFSGSGSGTDFTLT |
| | | | | | | | ISSLQPEDFATYYCQQSYSTPLTF |
| | | | | | | | GGGTKVEIK (SEQ ID NO: |
| | | | | | | | 174) |
| 19. | FTFD | SGIS | CAKD | QASQDI | DASNLET | CQQSYSTPLTF | EVQLLESGGGLVQPGGSLRLSCAA |
| | DYAM | WNSG | IVAA | SNYLN | (SEQ ID | (SEQ ID NO: | SGFTFDDYAMHWVRQAPGKGLEWV |
| | H | SIGY | GHYY | (SEQ | NO: | 173) | SGISWNSGSIGYADSVKGRFTISR |
| | (SEQ | A | YGMD | ID NO: | 159) | | DNSKNTLYLQMNSLRAEDTAVYYC |
| | ID | (SEQ | VW | 138) | | | AKDIVAAGHYYYGMDVWGQGTTVT |
| | NO: | ID | (SEQ | | | | VSSGGGGSGGGGSGGGGSGGGGSD |
| | 135) | NO: | ID | | | | IQMTQSPSSLSASVGDRVTITCQA |
| | | 175) | NO: | | | | SQDISNYLNWYQQKPGKAPKLLIY |
| | | | 176) | | | | DASNLETGVPSRFSGSGSGTDFTL |
| | | | | | | | TISSLQPEDFATYYCQQSYSTPLT |
| | | | | | | | FGGGTKVEIK (SEQ ID NO: |
| | | | | | | | 177) |
| 20. | FTFD | SYID | CARD | QAGQDI | DASNLET | CQQTYSTPITF | EVQLLESGGGLVQPGGSLRLSCAA |
| | DYAM | TSSS | EAAA | SNYLN | (SEQ ID | (SEQ ID NO: | SGFTFDDYAMHWVRQAPGKGLEWV |
| | H | HLYY | GYYG | (SEQ | NO: | 181) | SYIDTSSSHLYYADSVKGRFTISR |
| | (SEQ | A | MDVW | ID NO: | 159) | | DNSKNTLYLQMNSLRAEDTAVYYC |
| | ID | (SEQ | (SEQ | 180) | | | ARDEAAAGYYGMDVWGQGTTVTVS |
| | NO: | ID | ID | | | | SGGGGSGGGGSGGGGSGGGGSDIQ |
| | 135) | NO: | NO: | | | | MTQSPSSLSASVGDRVTITCQAGQ |
| | | 178) | 179) | | | | DISNYLNWYQQKPGKAPKLLIYDA |
| | | | | | | | SNLETGVPSRFSGSGSGTDFTLTI |
| | | | | | | | SSLQPEDFATYYCQQTYSTPITFG |
| | | | | | | | QGTKLEIK (SEQ ID NO: |
| | | | | | | | 182) |
| 21. | FTFS | STIV | CARD | RASQDI | AASSLQS | CQQSYSIPPTF | EVQLLESGGGLVQPGGSLRLSCAA |
| | NAWM | GNGG | NPLR | SNYLN | (SEQ ID | (SEQ ID NO: | SGFTFSNAWMSWVRQAPGKGLEWV |
| | S | ATYY | WQGM | (SEQ | NO: 65) | 187) | STIVGNGGATYYADSVKGRFTISR |
| | (SEQ | A | DVW | ID NO: | | | DNSKNTLYLQMNSLRAEDTAVYYC |
| | ID | (SEQ | (SEQ | 186) | | | ARDNPLRWQGMDVWGQGTLVTVSS |
| | NO: | ID | ID | | | | GGGGSGGGGSGGGGSGGGGSDIQM |
| | 183) | NO: | NO: | | | | TQSPSSLSASVGDRVTITCRASQD |
| | | 184) | 185) | | | | ISNYLNWYQQKPGKAPKLLIYAAS |
| | | | | | | | SLQSGVPSRFSGSGSGTDFTLTIS |
| | | | | | | | SLQPEDFATYYCQQSYSIPPTFGP |
| | | | | | | | GTKVDIK (SEQ ID NO: 188) |
| 22. | FTFS | SYIS | CARA | RASQSI | AASSLQS | CQQSYSTPLTF | EVQLLESGGGLVQPGGSLRLSCAA |
| | SYQM | SSST | NSSS | SSYLN | (SEQ ID | (SEQ ID NO: | SGFTFSSYQMSWVRQAPGKGLEWV |
| | S | YTNY | WYDW | SEQ | NO: 65) | 173) | SYISSSSTYTNYADSVKGRFTISR |
| | (SEQ | A | YFDL | ID NO: | | | DNSKNTLYLQMNSLRAEDTAVYYC |
| | ID | (SEQ | W | 172) | | | ARANSSSWYDWYFDLWGQGTLVTV |
| | NO: | ID | (SEQ | | | | SSGGGGSGGGGSGGGGSGGGGSDI |
| | 189) | NO: | ID | | | | QMTQSPSSLSASVGDRVTITCRAS |
| | | 190) | NO: | | | | QSISSYLNWYQQKPGKAPKLLIYA |
| | | | 191) | | | | ASSLQSGVPSRFSGSGSGTDFTLT |
| | | | | | | | ISSLQPEDFATYYCQQSYSTPLTF |
| | | | | | | | GGGTKVEIK (SEQ ID NO: |
| | | | | | | | 192) |
| 23. | FTFS | SGIS | CATS | RASQSI | AASNLQR | CQQSYSIPITF | EVQLLESGGGLVQPGGSLRLSCAA |
| | SYAM | GSGG | QAPV | SSWLA | (SEQ ID | (SEQ ID NO: | SGFTFSSYAMHWVRQAPGKGLEWV |
| | H | SAYY | DYYY | (SEQ | NO: | 198) | SGISGSGGSAYYADSVKGRFTISR |
| | (SEQ | A | YGMD | ID NO: | 197) | | DNSKNTLYLQMNSLRAEDTAVYYC |
| | ID | (SEQ | VW | 196) | | | ATSQAPVDYYYYGMDVWGQGTTVT |
| | NO: | ID | (SEQ | | | | VSSGGGGSGGGGSGGGGSGGGGSD |
| | 193) | NO: | ID | | | | IQMTQSPSSLSASVGDRVTITCRA |
| | | 194) | NO: | | | | SQSISSWLAWYQQKPGKAPKLLIY |
| | | | 195 | | | | AASNLQRGVPSRFSGSGSGTDFTL |
| | | | | | | | TISSLQPEDFATYYCQQSYSIPIT |
| | | | | | | | FGQGTKVEIK (SEQ ID NO: |
| | | | | | | | 199) |
| 24. | FTFS | SYIS | CARV | RASQSI | AASSLQS | CQQSYSTPLTF | EVQLVESGGGLVKPGGSLRLSCAA |
| | SYWM | GSSS | GSSG | SSYLN | (SEQ ID | (SEQ ID NO: | SGFTFSSYWMSWVRQAPGKGLEWV |
| | S | YTNY | WYDW | SEQ | NO: 65) | 173) | SYISGSSSYTNYAAPVKGRFTISR |
| | (SEQ | A | YFDL | ID NO: | | | DDSKNTLYLQMNSLKTEDTAVYYC |
| | ID | (SEQ | W | 172) | | | ARVGSSGWYDWYFDLWGRGTLVTV |
| | NO: | ID | (SEQ | | | | SSGGGGSGGGGSGGGGSGGGGSDI |
| | 169) | NO: | ID | | | | QMTQSPSSLSASVGDRVTITCRAS |
| | | 200) | NO: | | | | QSISSYLNWYQQKPGKAPKLLIYA |
| | | | 201) | | | | ASSLQSGVPSRFSGSGSGTDFTLT |
| | | | | | | | ISSLQPEDFATYYCQQSYSTPLTF |
| | | | | | | | GQGTKVEIK (SEQ ID NO: |
| | | | | | | | 202) |
| 25. | YTLT | GWIN | CAKG | RASDNI | AASSLQS | CQQGYSTPPTF | QVQLVQSGAEVKKPGASVKVSCKA |
| | TWYM | PNRG | DLWG | GSWLA | (SEQ ID | (SEQ ID NO: | SGYTLTTWYMYWVRQAPGQGLEWM |
| | Y | ATNY | AMDV | (SEQ | NO: 65) | 120) | GWINPNRGATNYAQKFQGRVTMTR |
| | (SEQ | A | W | ID NO: | | | DTSTSTVYMELSSLRSEDTAVYYC |
| | ID | (SEQ | (SEQ | 119) | | | AKGDLWGAMDVWGQGTLVTVSSGG |
| | NO: | ID | ID | | | | GGSGGGGSGGGGSGGGGSDIQMTQ |
| | 116) | NO: | NO: | | | | SPSSLSASVGDRVTITCRASDNIG |
| | | 117) | 118) | | | | SWLAWYQQKPGKAPKLLIYAASSL |
| | | | | | | | QSGVPSRFSGSGSGTDFTLTISSL |
| | | | | | | | QPEDFATYYCQQGYSTPPTFGQGT |
| | | | | | | | KVEIK (SEQ ID NO: 121) |
| 26. | YTLT | GWIN | CAKG | RASDNI | AASSLQS | CQQGYSTPPTF | QVQLVQSGAEVKKPGASVKVSCKA |
| | TWYM | PNRG | DLWG | GSWLA | (SEQ ID | (SEQ ID NO: | SGYTLTTWYMYWVRQAPGQGLEWM |
| | Y | ATNY | AMDV | (SEQ | NO: 65) | 120) | GWINPNRGATNYAQKFQGRVTMTR |
| | (SEQ | A | W | ID NO: | | | DTSTSTVYMELSSLRSEDTAVYYC |
| | ID | (SEQ | (SEQ | 119) | | | AKGDLWGAMDVWGQGTTVTVSSGG |
| | NO: | ID | ID | | | | GGSGGGGSGGGGSGGGGSDIQMTQ |
| | 116) | NO: | NO: | | | | SPSSLSASVGDRVTITCRASDNIG |
| | | 117) | 118) | | | | SWLAWYQQKPGKAPKLLIYAASSL |
| | | | | | | | QSGVPSRFSGSGSGTDFTLTISSL |
| | | | | | | | QPEDFATYYCQQGYSTPPTFGQGT |
| | | | | | | | KVEIK (SEQ ID NO: 203) |
| 27. | YTFT | GWMN | CARD | RASQSI | AASSLQS | CQQSYTAPYTF | QVQLVQSGAEVKKPGASVKVSCKA |
| | GYYI | PNSG | PGFL | SSYLH | (SEQ ID | (SEQ ID NO: | SGYTFTGYYIHWVRQAPGQGLEWM |
| | H | NTGY | GYCS | (SEQ | NO: 65) | 208) | GWMNPNSGNTGYAQKFQGRVTMTR |
| | (SEQ | A | GGSC | ID NO: | | | DTSTSTVYMELSSLRSEDTAVYYC |
| | ID | (SEQ | YDGW | 207) | | | ARDPGFLGYCSGGSCYDGWFDPWG |
| | NO: | ID | FDPW | | | | QGTLVTVSSGGGGSGGGGSGGGGS |
| | 204) | NO: | (SEQ | | | | GGGGSDIQMTQSPSSLSASVGDRV |
| | | 205) | ID | | | | TITCRASQSISSYLHWYQQKPGKA |
| | | | NO: | | | | PKLLIYAASSLQSGVPSRFSGSGS |
| | | | 206) | | | | GTDFTLTISSLQPEDFATYYCQQS |
| | | | | | | | YTAPYTFGQGTKLEIK (SEQ ID |
| | | | | | | | NO: 209) |
| 28. | YTFT | GWMN | CARE | RASQGI | DASNLET | CQQSYSTPLTF | QVQLVQSGAEVKKPGASVKVSCKA |
| | DYFL | PTSG | GEGS | NSWLA | (SEQ ID | (SEQ ID NO: | SGYTFTDYFLHWVRQAPGQGLEWM |
| | H | NTGY | GFDY | (SEQ | NO: | 173) | GWMNPTSGNTGYAQKFQGRVTMTR |
| | (SEQ | A | W | ID NO: | 159) | | DTSTSTVYMELSSLRSEDTAVYYC |
| | ID | (SEQ | (SEQ | 213) | | | AREGEGSGFDYWGQGTLVTVSSGG |
| | NO: | ID | ID | | | | GGSGGGGSGGGGSGGGGSDIQMTQ |
| | 210) | NO: | NO: | | | | SPSSLSASVGDRVTITCRASQGIN |
| | | 211) | 212) | | | | SWLAWYQQKPGKAPKLLIYDASNL |
| | | | | | | | ETGVPSRFSGSGSGTDFTLTISSL |
| | | | | | | | QPEDFATYYCQQSYSTPLTFGGGT |
| | | | | | | | KVEIK (SEQ ID NO: 214) |
| 29. | YTFT | AWMN | CARD | RASQGI | AASSLQS | CQQSYSTPWTF | QVQLVQSGAEVKKPGASVKVSCKA |
| | SYYM | PNSG | YDFW | SNYLA | (SEQ ID | (SEQ ID NO: | SGYTFTSYYMHWVRQAPGQGLEWM |
| | H | NTGY | SGSL | (SEQ | NO: 65) | 114) | AWMNPNSGNTGYAQKFQGRVTMTR |
| | (SEQ | A | GYW | ID NO: | | | DTSTSTVYMELSSLRSEDTAVYYC |
| | ID | (SEQ | (SEQ | 218) | | | ARDYDFWSGSLGYWGQGTLVTVSS |
| | NO: | ID | ID | | | | GGGGSGGGGSGGGGSGGGGSDIQM |
| | 215 | NO: | NO: | | | | TQSPSSLSASVGDRVTITCRASQG |
| | | 216) | 217) | | | | ISNYLAWYQQKPGKAPKLLIYAAS |
| | | | | | | | SLQSGVPSRFSGSGSGTDFTLTIS |
| | | | | | | | SLQPEDFATYYCQQSYSTPWTFGQ |
| | | | | | | | GTKVEIK (SEQ ID NO: 219) |
| 30. | YTLT | GWIN | CAKG | RASDNI | AASSLQS | CQQGYSTPPTF | QVQLVQSGAEVKKPGASVKVSCKA |
| | TWYM | PNRG | DLWG | GSWLA | (SEQ ID | (SEQ ID NO: | SGYTLTTWYMYWVRQAPGQGLEWM |
| | Y | ATNY | AMDV | (SEQ | NO: 65) | 120) | GWINPNRGATNYAQKFQGRVTMTR |
| | (SEQ | A | W | ID NO: | | | DTSTSTVYMELSSLRSEDTAVYYC |
| | ID | (SEQ | (SEQ | 119) | | | AKGDLWGAMDVWGQGTLVTVSSGG |
| | NO: | ID | ID | | | | GGSGGGGSGGGGSGGGGSDIQMTQ |
| | 116) | NO: | NO: | | | | SPSSLSASVGDRVTITCRASDNIG |
| | | 117) | 118) | | | | SWLAWYQQKPGKAPKLLIYAASSL |
| | | | | | | | QSGVPSRFSGSGSGTDFTLTISSL |
| | | | | | | | QPEDFATYYCQQGYSTPPTFGQGT |
| | | | | | | | KVEIK (SEQ ID NO: 121) |
| 31. | YTFT | GIIN | CARD | RASQSI | DASNLQS | CQQSYSIPITF | QVQLVQSGAEVKKPGASVKVSCKA |
| | SYYM | PSGG | TGYS | GRWLA | (SEQ ID | (SEQ ID NO: | SGYTFTSYYMHWVRQAPGQGLEWM |
| | H | STSY | YGRY | (SEQ | NO: | 198) | GIINPSGGSTSYAQKFQGRVTMTR |
| | (SEQ | A | YYYG | ID NO: | 222) | | DTSTSTVYMELSSLRSEDTAVYYC |
| | ID | (SEQ | MDVW | 221) | | | ARDTGYSYGRYYYYGMDVWGQGTL |
| | NO: | ID | (SEQ | | | | VTVSSGGGGSGGGGSGGGGSGGGG |
| | 215) | NO: | ID | | | | SDIQMTQSPSSLSASVGDRVTITC |
| | | 69) | NO: | | | | RASQSIGRWLAWYQQKPGKAPKLL |
| | | | 220) | | | | IYDASNLQSGVPSRFSGSGSGTDF |
| | | | | | | | TLTISSLQPEDFATYYCQQSYSIP |
| | | | | | | | ITFGQGTKVEIK (SEQ ID NO: |
| | | | | | | | 223) |
| 32. | YTLT | GIIN | CARE | RASQGI | AASSLQS | CQQSYSTPLTF | QVQLVQSGAEVKKPGASVKVSCKA |
| | DYYM | PSGG | EYSS | SSWLA | (SEQ ID | (SEQ ID NO: | SGYTLTDYYMHWVRQAPGQGLEWM |
| | H | STSY | SSGY | SEQ | NO: 65) | 173) | GIINPSGGSTSYAQKFQGRVTMTR |
| | (SEQ | A | FDYW | ID NO: | | | DTSTSTVYMELSSLRSEDTAVYYC |
| | ID | (SEQ | (SEQ | 226) | | | AREEYSSSSGYFDYWGQGTLVTVS |
| | NO: | ID | ID | | | | SGGGGSGGGGSGGGGSGGGGSDIQ |
| | 224) | NO: | NO: | | | | MTQSPSSLSASVGDRVTITCRASQ |
| | | 69) | 225) | | | | GISSWLAWYQQKPGKAPKLLIYAA |
| | | | | | | | SSLQSGVPSRFSGSGSGTDFTLTI |
| | | | | | | | SSLQPEDFATYYCQQSYSTPLTFG |
| | | | | | | | QGTKVEIK (SEQ ID NO: |
| | | | | | | | 227) |
| 33. | YTFT | GWMH | CARD | RASQSI | AASSLQS | CQQSYSVPITF | QVQLVQSGAEVKKPGASVKVSCKA |
| | SYGI | PKSG | TPYY | SSWLA | (SEQ ID | (SEQ ID NO: | SGYTFTSYGISWVRQAPGQGLEWM |
| | S | DTGL | YYGM | (SEQ | NO: 65) | 231) | GWMHPKSGDTGLTQKFQGRVTMTR |
| | (SEQ | T | DVW | ID NO: | | | DTSTSTVYMELSSLRSEDTAVYYC |
| | ID | (SEQ | (SEQ | 196) | | | ARDTPYYYYGMDVWGQGTTVTVSS |
| | NO: | ID | ID | | | | GGGGSGGGGSGGGGSGGGGSDIQM |
| | 228) | NO: | NO: | | | | TQSPSSLSASVGDRVTITCRASQS |
| | | 229) | 230) | | | | ISSWLAWYQQKPGKAPKLLIYAAS |
| | | | | | | | SLQSGVPSRFSGSGSGTDFTLTIS |
| | | | | | | | SLQPEDFATYYCQQSYSVPITFGQ |
| | | | | | | | GTKVEIK (SEQ ID NO: 232) |
| 34. | FTFG | SYIS | CARD | RASQSI | AASSLQS | CQQSYSTPLTF | EVQLVESGGGLVKPGGSLRLSCAA |
| | DYAM | GDIG | VAAT | SSYLN | (SEQ ID | (SEQ ID NO: | SGFTFGDYAMSWVRQAPGKGLEWV |
| | S | YTNY | GNWY | (SEQ | NO: 65) | 173) | SYISGDIGYTNYAAPVKGRFTISR |
| | (SEQ | A | FDLW | ID NO: | | | DDSKNTLYLQMNSLKTEDTAVYYC |
| | ID | (SEQ | (SEQ | 172) | | | ARDVAATGNWYFDLWGRGTLVTVS |
| | NO: | ID | ID | | | | SGGGGSGGGGSGGGGSGGGGSDIQ |
| | 233) | NO: | NO: | | | | MTQSPSSLSASVGDRVTITCRASQ |
| | | 234) | 235) | | | | SISSYLNWYQQKPGKAPKLLIYAA |
| | | | | | | | SSLQSGVPSRFSGSGSGTDFTLTI |
| | | | | | | | SSLQPEDFATYYCQQSYSTPLTFG |
| | | | | | | | GGTKVEIK (SEQ ID NO: |
| | | | | | | | 236) |
| 35. | FSFS | SFIT | CARD | RASQSV | GASTRAT | CQQYGSSPLTF | EVQLLESGGGLVQPGGSLRLSCAA |
| | SYTM | SSSR | RRGD | RNYLA | (SEQ ID | (SEQ ID NO: | SGFSFSSYTMNWVRQAPGKGLEWV |
| | N | TIYY | YGDS | (SEQ | NO: | 242) | SFITSSSRTIYYADSVKGRFTISR |
| | (SEQ | A | WYFD | ID NO: | 241) | | DNSKNTLYLQMNSLRAEDTAVYYC |
| | ID | (SEQ | LW | 240) | | | ARDRRGDYGDSWYFDLWGRGTLVT |
| | NO: | ID | (SEQ | | | | VSSGGGGSGGGGSGGGGSGGGGSE |
| | 237) | NO: | ID | | | | IVMTQSPATLSVSPGERATLSCRA |
| | | 238) | NO: | | | | SQSVRNYLAWYQQKPGQAPRLLIY |
| | | | 239) | | | | GASTRATGIPARFSGSGSGTEFTL |
| | | | | | | | TISSLQSEDFAVYYCQQYGSSPLT |
| | | | | | | | FGGGTKVEIK (SEQ ID NO: |
| | | | | | | | 243) |
| 36. | YTFT | GIIN | CARD | RASQSI | DASNLQS | CQQSYSIPITF | QVQLVQSGAEVKKPGASVKVSCKA |
| | GHYM | PSGG | TGYS | GRWLA | (SEQ ID | (SEQ ID NO: | SGYTFTGHYMHWVRQAPGQGLEWM |
| | H | STSY | YGRY | (SEQ | NO: | 198) | GIINPSGGSTSYAQKFQGRVTMTR |
| | (SEQ | A | YYYG | ID NO: | 222) | | DTSTSTVYMELSSLRSEDTAVYYC |
| | ID | (SEQ | MDVW | 221) | | | ARDTGYSYGRYYYYGMDVWGQGTT |
| | NO: | ID | (SEQ | | | | VTVSSGGGGSGGGGSGGGGSGGGG |
| | 244) | NO: | ID | | | | SDIQMTQSPSSLSASVGDRVTITC |
| | | 69) | NO: | | | | RASQSIGRWLAWYQQKPGKAPKLL |
| | | | 220 | | | | IYDASNLQSGVPSRFSGSGSGTDE |
| | | | | | | | TLTISSLQPEDFATYYCQQSYSIP |
| | | | | | | | ITFGGGTKVEIK (SEQ ID NO: |
| | | | | | | | 245) |
| 37. | YTFS | GWMN | CARG | RASQSI | AASTLQS | CQQSYSTPWTF | QVQLVQSGAEVKKPGASVKVSCKA |
| | KHFV | PNSG | EGGY | SSWLA | (SEQ ID | (SEQ ID NO: | SGYTFSKHFVHWVRQAPGQGLEWM |
| | H | NSGY | YYYG | (SEQ | NO: | 114) | GWMNPNSGNSGYAQKFQGRVTMTR |
| | (SEQ | A | MDVW | ID NO: | 113) | | DTSTSTVYMELSSLRSEDTAVYYC |
| | ID | (SEQ | (SEQ | 196) | | | ARGEGGYYYYGMDVWGQGTLVTVS |
| | NO: | ID | ID | | | | SGGGGSGGGGSGGGGSGGGGSDIQ |
| | 246) | NO: | NO: | | | | MTQSPSSLSASVGDRVTITCRASQ |
| | | 247) | 248) | | | | SISSWLAWYQQKPGKAPKLLIYAA |
| | | | | | | | STLQSGVPSRFSGSGSGTDFTLTI |
| | | | | | | | SSLQPEDFATYYCQQSYSTPWTFG |
| | | | | | | | QGTKVEIK (SEQ ID NO: |
| | | | | | | | 249) |
| 38. | FTFG | SAIG | CAKG | RASQPL | AASSLQS | CQQAISFPLTF | EVQLLESGGGLVQPGGSLRLSCAA |
| | SYSM | TGGG | TPYY | SNWLA | (SEQ ID | (SEQ ID NO: | SGFTFGSYSMSWVRQAPGKGLEWV |
| | S | TYYA | YYYG | (SEQ | NO: 65) | 254) | SAIGTGGGTYYADSVKGRFTISRD |
| | (SEQ | (SEQ | MDVW | ID NO: | | | NSKNTLYLQMNSLRAEDTAVYYCA |
| | ID | ID | (SEQ | 253) | | | KGTPYYYYYGMDVWGQGTMVTVSS |
| | NO: | NO: | ID | | | | GGGGSGGGGSGGGGSGGGGSDIQM |
| | 250) | 251) | NO: | | | | TQSPSSLSASVGDRVTITCRASQP |
| | | | 252 | | | | LSNWLAWYQQKPGKAPKLLIYAAS |
| | | | | | | | SLQSGVPSRFSGSGSGTDFTLTIS |
| | | | | | | | SLQPEDFATYYCQQAISFPLTFGG |
| | | | | | | | GTKVEIK (SEQ ID NO: 255) |
| 39. | YTFT | GWMN | CARD | QSSEDI | AASSLQI | CQQTYSTPYTF | QVQLVQSGAEVKKPGASVKVSCKA |
| | SYYM | PNSG | LGYY | SSSLN | (SEQ ID | (SEQ ID NO: | SGYTFTSYYMHWVRQAPGQGLEWM |
| | H | NTGY | DSSG | (SEQ | NO: | 259) | GWMNPNSGNTGYAQKFQGRVTMTR |
| | (SEQ | A | YFGA | ID NO: | 258) | | DTSTSTVYMELSSLRSEDTAVYYC |
| | ID | (SEQ | FDIW | 257) | | | ARDLGYYDSSGYFGAFDIWGQGTT |
| | NO: | ID | (SEQ | | | | VTVSSGGGGSGGGGSGGGGSGGGG |
| | 215) | NO: | ID | | | | SDIQMTQSPSSLSASVGDRVTITC |
| | | 205) | NO: | | | | QSSEDISSSLNWYQQKPGKAPKLL |
| | | | 256) | | | | IYAASSLQIGVPSRFSGSGSGTDE |
| | | | | | | | TLTISSLQPEDFATYYCQQTYSTP |
| | | | | | | | YTFGQGTKVEIK (SEQ ID NO: |
| | | | | | | | 260) |
| 40. | YTFT | GIIN | CARG | RASQGI | AASNLET | CQQIHSYPLTF | QVQLVQSGAEVKKPGASVKVSCKA |
| | SYGI | PRGG | TRSS | GNWLA | (SEQ ID | (SEQ ID NO: | SGYTFTSYGISWVRQAPGQGLEWM |
| | S | STIF | GWYG | (SEQ | NO: | 265) | GIINPRGGSTIFAQKFQGRVTMTR |
| | (SEQ | A | WFDP | ID NO: | 264) | | DTSTSTVYMELSSLRSEDTAVYYC |
| | ID | (SEQ | W | 263) | | | ARGTRSSGWYGWFDPWGQGTLVTV |
| | NO: | ID | (SEQ | | | | SSGGGGSGGGGSGGGGSGGGGSDI |
| | 228) | NO: | ID | | | | QMTQSPSSLSASVGDRVTITCRAS |
| | | 261) | NO: | | | | QGIGNWLAWYQQKPGKAPKLLIYA |
| | | | 262) | | | | ASNLETGVPSRFSGSGSGTDFTLT |
| | | | | | | | ISSLQPEDFATYYCQQIHSYPLTF |
| | | | | | | | GGGTKVEIK (SEQ ID NO: |
| | | | | | | | 266) |
| 41. | FTFD | SYIS | CARE | RASQSI | AASSLQS | CQQSYSTPLTF | EVQLLESGGGLVQPGGSLRLSCAA |
| | DYGM | SSSS | IAAA | SSYLN | (SEQ ID | (SEQ ID NO: | SGFTFDDYGMSWVRQAPGKGLEWV |
| | S | YIYY | GFYG | (SEQ | NO: 65) | 173) | SYISSSSSYIYYADSVKGRFTISR |
| | (SEQ | A | MDVW | ID NO: | | | DNSKNTLYLQMNSLRAEDTAVYYC |
| | ID | (SEQ | (SEQ | 172) | | | AREIAAAGFYGMDVWGQGTTVTVS |
| | NO: | ID | ID | | | | SGGGGSGGGGSGGGGSGGGGSDIQ |
| | 267) | NO: | NO: | | | | MTQSPSSLSASVGDRVTITCRASQ |
| | | 268) | 269) | | | | SISSYLNWYQQKPGKAPKLLIYAA |
| | | | | | | | SSLQSGVPSRFSGSGSGTDFTLTI |
| | | | | | | | SSLQPEDFATYYCQQSYSTPLTFG |
| | | | | | | | GGTKVEIK (SEQ ID NO: |
| | | | | | | | 270) |
| 42. | GTLS | GGII | CARD | RASQSV | GASTRAT | CQQYGSSPITF | QVQLVQSGAEVKKPGSSVKVSCKA |
| | RYGV | PIFG | RVYY | SSSYLA | (SEQ ID | (SEQ ID NO: | SGGTLSRYGVSWVRQAPGQGLEWM |
| | S | TTNY | DSSG | (SEQ | NO: | 275) | GGIIPIFGTTNYAQKFQGRVTITA |
| | (SEQ | A | YPTW | ID NO: | 241) | | DESTSTAYMELSSLRSEDTAVYYC |
| | ID | (SEQ | YFDL | 274) | | | ARDRVYYDSSGYPTWYFDLWGRGT |
| | NO: | ID | W | | | | LVTVSSGGGGSGGGGSGGGGSGGG |
| | 271) | NO: | (SEQ | | | | GSEIVMTQSPATLSVSPGERATLS |
| | | 272 | ID | | | | CRASQSVSSSYLAWYQQKPGQAPR |
| | | | NO: | | | | LLIYGASTRATGIPARFSGSGSGT |
| | | | 273) | | | | EFTLTISSLQSEDFAVYYCQQYGS |
| | | | | | | | SPITFGQGTKVEIK (SEQ ID |
| | | | | | | | NO: 276) |
| 43. | FTFD | SGIS | CARD | QASQDI | KASTLES | CQQANSFPLTF | EVQLLESGGGLVQPGGSLRLSCAA |
| | DFAM | GNGD | ASYG | RNYLN | (SEQ ID | (SEQ ID NO: | SGFTFDDFAMHWVRQAPGKGLEWV |
| | H | SRYY | GNYG | (SEQ | NO: | 167) | SGISGNGDSRYYADSVKGRFTISR |
| | (SEQ | A | MDVW | ID NO: | 139) | | DNSKNTLYLQMNSLRAEDTAVYYC |
| | ID | (SEQ | (SEQ | 280) | | | ARDASYGGNYGMDVWGQGTTVTVS |
| | NO: | ID | ID | | | | SGGGGSGGGGSGGGGSGGGGSDIQ |
| | 277) | NO: | NO: | | | | MTQSPSSLSASVGDRVTITCQASQ |
| | | 278) | 279) | | | | DIRNYLNWYQQKPGKAPKLLIYKA |
| | | | | | | | STLESGVPSRFSGSGSGTDFTLTI |
| | | | | | | | SSLQPEDFATYYCQQANSFPLTFG |
| | | | | | | | PGTKVDIK (SEQ ID NO: |
| | | | | | | | 281) |
| 44. | FTQS | SAIG | CARE | RASQSI | GASNLQS | CQQSYSTPWTF | EVQLVESGGGLVKPGGSLRLSCAA |
| | SYWM | TGGG | WLVP | SRWLA | (SEQ ID | (SEQ ID NO: | SGFTFSSYWMSWVRQAPGKGLEWV |
| | S | TYYA | YYGM | (SEQ | NO: | 114) | SAIGTGGGTYYAAPVKGRFTISRD |
| | (SEQ | (SEQ | DVW | ID NO: | 284) | | DSKNTLYLQMNSLKTEDTAVYYCA |
| | ID | ID | (SEQ | 283) | | | REWLVPYYGMDVWGQGTTVTVSSG |
| | NO: | NO: | ID | | | | GGGSGGGGSGGGGSGGGGSDIQMT |
| | 169) | 251) | NO: | | | | QSPSSLSASVGDRVTITCRASQSI |
| | | | 282) | | | | SRWLAWYQQKPGKAPKLLIYGASN |
| | | | | | | | LQSGVPSRFSGSGSGTDFTLTISS |
| | | | | | | | LQPEDFATYYCQQSYSTPWTFGQG |
| | | | | | | | TKVEIK (SEQ ID NO: 285) |
| 45. | FSVS | AGIS | CARS | KSSQSV | WASTRQS | CHQYYGHPPTF | EVQLLESGGGLVQPGGSLRLSCAA |
| | SNYM | YDGS | RGIA | LYSSNN | (SEQ ID | (SEQ ID NO: | SGFSVSSNYMSWVRQAPGKGLEWV |
| | S | SKPY | ARPL | KNYLA | NO: | 291) | AGISYDGSSKPYADSVKGRFTISR |
| | (SEQ | A | QHW | (SEQ | 290) | | DNSKNTLYLQMNSLRAEDTAVYYC |
| | ID | (SEQ | (SEQ | ID NO: | | | ARSRGIAARPLQHWGQGTLVTVSS |
| | NO: | ID | ID | 289) | | | GGGGSGGGGSGGGGSGGGGSDIVM |
| | 286) | NO: | NO: | | | | TQSPDSLAVSLGERATINCKSSQS |
| | | 287) | 288) | | | | VLYSSNNKNYLAWYQQKPGQPPKL |
| | | | | | | | LIYWASTRQSGVPDRFSGSGSGTD |
| | | | | | | | FTLTISSLQAEDVAVYYCHQYYGH |
| | | | | | | | PPTFGGGTKVEIK (SEQ ID |
| | | | | | | | NO: 292) |
| 46. | FSVS | AGIS | CARS | KSSQSV | QASTRQS | CHQYYGHPPTF | EVQLLESGGGLVQPGGSLRLSCAA |
| | SNYM | YDGS | RGIA | LYSSNN | (SEQ ID | (SEQ ID NO: | SGFSVSSNYMSWVRQAPGKGLEWV |
| | S | SKPY | ARPL | KNYLA | NO: | 291) | AGISYDGSSKPYADSVKGRFTISR |
| | (SEQ | A | QHW | (SEQ | 293) | | DNSKNTLYLQMNSLRAEDTAVYYC |
| | ID | (SEQ | (SEQ | ID NO: | | | ARSRGIAARPLQHWGQGTLVTVSS |
| | NO: | ID | ID | 289) | | | GGGGSGGGGSGGGGSGGGGSDIVM |
| | 286) | NO: | NO: | | | | TQSPDSLAVSLGERATINCKSSQS |
| | | 287) | 288) | | | | VLYSSNNKNYLAWYQQKPGQPPKL |
| | | | | | | | LIYQASTRQSGVPDRFSGSGSGTD |
| | | | | | | | FTLTISSLQAEDVAVYYCHQYYGH |
| | | | | | | | PPTFGGGTKVEIK (SEQ ID |
| | | | | | | | NO: 294) |
| 47. | FSFS | SAIS | CARD | RASQGI | DASNLET | CQQSYSTPLTF | EVQLLESGGGLVQPGGSLRLSCAA |
| | DYGM | GSGG | GGWQ | SNNLN | (SEQ ID | (SEQ ID NO: | SGFSFSDYGMHWVRQAPGKGLEWV |
| | H | STYY | PAAI | (SEQ | NO: | 173) | SAISGSGGSTYYADSVKGRFTISR |
| | (SEQ | A | LDYW | ID NO: | 159) | | DNSKNTLYLQMNSLRAEDTAVYYC |
| | ID | (SEQ | (SEQ | 105) | | | ARDGGWQPAAILDYWGQGTLVTVS |
| | NO: | ID | ID | | | | SGGGGSGGGGSGGGGSGGGGSDIQ |
| | 295) | NO: | NO: | | | | MTQSPSSLSASVGDRVTITCRASQ |
| | | 103) | 296) | | | | GISNNLNWYQQKPGKAPKLLIYDA |
| | | | | | | | SNLETGVPSRFSGSGSGTDFTLTI |
| | | | | | | | SSLQPEDFATYYCQQSYSTPLTFG |
| | | | | | | | GGTKVEIK (SEQ ID NO: |
| | | | | | | | 297) |
| 48. | FTFS | SVIY | CARD | RASQGI | DASNLET | CFQSYSTCYTF | EVQLLESGGGLVQPGGSLRLSCAA |
| | DHGM | GGES | PAVA | SNYLA | (SEQ ID | (SEQ ID NO: | SGFTFSDHGMHWVRQAPGKGLEWV |
| | H | TYYA | GGGI | (SEQ | NO: | 301) | SVIYGGESTYYADSVKGRFTISRD |
| | (SEQ | (SEQ | FDYW | ID NO: | 159) | | NSKNTLYLQMNSLRAEDTAVYYCA |
| | ID | ID | (SEQ | 218) | | | RDPAVAGGGIFDYWGQGTLVTVSS |
| | NO: | NO: | ID | | | | GGGGSGGGGSGGGGSGGGGSDIQM |
| | 298) | 299) | NO: | | | | TQSPSSLSASVGDRVTITCRASQG |
| | | | 300) | | | | ISNYLAWYQQKPGKAPKLLIYDAS |
| | | | | | | | NLETGVPSRFSGSGSGTDFTLTIS |
| | | | | | | | SLQPEDFATYYCQQSYSTCYTFGQ |
| | | | | | | | GTKLEIK (SEQ ID NO: 302) |
| 49. | DTFT | GWIN | CARS | RASQTI | DASTLFS | CFQYSSYPLTF | QVQLVQSGAEVKKPGASVKVSCKA |
| | GYYI | PNSG | GLWL | SIWLA | (SEQ ID | (SEQ ID NO: | SGDTFTGYYIHWVRQAPGQGLEWM |
| | H | GTNY | GSYY | (SEQ | NO: | 308) | GWINPNSGGTNYAQKFQGRVTMTR |
| | (SEQ | A | GMDV | ID NO: | 307) | | DTSTSTVYMELSSLRSEDTAVYYC |
| | ID | (SEQ | W | 306) | | | ARSGLWLGSYYGMDVWGQGTLVTV |
| | NO: | ID | (SEQ | | | | SSGGGGSGGGGSGGGGSGGGGSDI |
| | 303) | NO: | ID | | | | QMTQSPSSLSASVGDRVTITCRAS |
| | | 304) | NO: | | | | QTISIWLAWYQQKPGKAPKLLIYD |
| | | | 305) | | | | ASTLQSGVPSRFSGSGSGTDFTLT |
| | | | | | | | ISSLQPEDFATYYCQQYSSYPLTF |
| | | | | | | | GQGTKVEIK (SEQ ID NO: |
| | | | | | | | 309) |
| 50. | YTFT | GWIN | CARS | RASHFI | AASTLFS | CQQSYSGISF | QVQLVQSGAEVKKPGASVKVSCKA |
| | SYDI | PNSG | PYYY | SRWVA | (SEQ ID | (SEQ ID NO: | SGYTFTSYDINWVRQAPGQGLEWM |
| | N | TTGY | YGMD | (SEQ | NO: | 314) | GWINPNSGTTGYAQKFQGRVTMTR |
| | (SEQ | A | VW | ID NO: | 113) | | DTSTSTVYMELSSLRSEDTAVYYC |
| | ID | (SEQ | (SEQ | 313) | | | ARSPYYYYGMDVWGQGTTVTVSSG |
| | NO: | ID | ID | | | | GGGSGGGGSGGGGSGGGGSDIQMT |
| | 310) | NO: | NO: | | | | QSPSSLSASVGDRVTITCRASHFI |
| | | 311) | 312) | | | | SRWVAWYQQKPGKAPKLLIYAAST |
| | | | | | | | LQSGVPSRFSGSGSGTDFTLTISS |
| | | | | | | | LQPEDFATYYCQQSYSGISFGPGT |
| | | | | | | | KVDIK (SEQ ID NO: 315) |
| 51. | FTFN | SRIN | CARG | RASQSV | ATSSRAS | CQQYYSGLTF | EVQLLESGGGLVQPGGSLRLSCAA |
| | NYGM | SDGS | AYYY | SGSYLA | (SEQ ID | (SEQ ID NO: | SGFTFNNYGMNWVRQAPGKGLEWV |
| | N | STSY | YYMD | (SEQ | NO: | 321) | SRINSDGSSTSYADSVKGRFTISR |
| | (SEQ | A | VW | ID NO: | 320) | | DNSKNTLYLQMNSLRAEDTAVYYC |
| | ID | (SEQ | (SEQ | 319) | | | ARGAYYYYYMDVWGQGTLVTVSSG |
| | NO: | ID | ID | | | | GGGSGGGGSGGGGSGGGGSEIVMT |
| | 316) | NO: | NO: | | | | QSPATLSVSPGERATLSCRASQSV |
| | | 317) | 318) | | | | SGSYLAWYQQKPGQAPRLLIYATS |
| | | | | | | | SRASGIPARFSGSGSGTEFTLTIS |
| | | | | | | | SLQSEDFAVYYCQQYYSGLTFGQG |
| | | | | | | | TKVEIK (SEQ ID NO: 322) |
| 52. | FTFS | AHIW | CARD | RASQDI | DASSLET | CQQATSLPLTF | EVQLLESGGGLVQPGGSLRLSCAA |
| | NSDM | NDGS | RTDP | RNYLG | (SEQ ID | (SEQ ID NO: | SGFTFSNSDMNWVRQAPGKGLEWV |
| | N | QKYY | GYSS | (SEQ | NO: | 328) | AHIWNDGSQKYYADSVKGRFTISR |
| | (SEQ | A | AMDV | ID NO: | 327) | | DNSKNTLYLQMNSLRAEDTAVYYC |
| | ID | (SEQ | W | 326) | | | ARDRTDPGYSSAMDVWGQGTTVTV |
| | NO: | ID | (SEQ | | | | SSGGGGSGGGGSGGGGSGGGGSDI |
| | 323) | NO: | ID | | | | QMTQSPSSLSASVGDRVTITCRAS |
| | | 324) | NO: | | | | QDIRNYLGWYQQKPGKAPKLLIYD |
| | | | 325) | | | | ASSLETGVPSRFSGSGSGTDFTLT |
| | | | | | | | ISSLQPEDFATYYCQQATSLPLTF |
| | | | | | | | GGGTKVEIK (SEQ ID NO: |
| | | | | | | | 329) |
| 53. | YTFT | GWMN | CAKD | RASQDI | QASSLES | CQQSYTIPLTF | QVQLVQSGAEVKKPGASVKVSCKA |
| | SYDI | PNSG | SDYS | TNDLG | (SEQ ID | (SEQ ID NO: | SGYTFTSYDINWVRQAPGQGLEWM |
| | N | NTGY | NLLW | (SEQ | NO: | 333) | GWMNPNSGNTGYAQKFQGRVTMTR |
| | (SEQ | A | DYW | ID NO: | 332) | | DTSTSTVYMELSSLRSEDTAVYYC |
| | ID | (SEQ | (SEQ | 331) | | | AKDSDYSNLLWDYWGQGTLVTVSS |
| | NO: | ID | ID | | | | GGGGSGGGGSGGGGSGGGGSDIQM |
| | 310) | NO: | NO: | | | | TQSPSSLSASVGDRVTITCRASQD |
| | | 205) | 330) | | | | ITNDLGWYQQKPGKAPKLLIYQAS |
| | | | | | | | SLESGVPSRFSGSGSGTDFTLTIS |
| | | | | | | | SLQPEDFATYYCQQSYTIPLTFGQ |
| | | | | | | | GTKVEIK (SEQ ID NO: 334) |
| 54. | FTFG | AVVS | CAKD | RASQNI | DASNLET | CQQANSFPPTF | EVQLLESGGGLVQPGGSLRLSCAA |
| | DYAM | YDGT | ICSS | NNYVN | (SEQ ID | (SEQ ID NO: | SGFTFGDYAMSWVRQAPGKGLEWV |
| | S | NKYY | TSCY | (SEQ | NO: | 338) | AVVSYDGTNKYYADSVKGRFTISR |
| | (SEQ | A | FDLW | ID NO: | 159) | | DNSKNTLYLQMNSLRAEDTAVYYC |
| | ID | (SEQ | (SEQ | 337) | | | AKDICSSTSCYFDLWGRGTLVTVS |
| | NO: | ID | ID | | | | SGGGGSGGGGSGGGGSGGGGSDIQ |
| | 233) | NO: | NO: | | | | MTQSPSSLSASVGDRVTITCRASQ |
| | | 335) | 336) | | | | NINNYVNWYQQKPGKAPKLLIYDA |
| | | | | | | | SNLETGVPSRFSGSGSGTDFTLTI |
| | | | | | | | SSLQPEDFATYYCQQANSFPPTFG |
| | | | | | | | QGTRLEIK (SEQ ID NO: |
| | | | | | | | 339) |
| 55. | YTFT | GIID | CARE | RASQGI | ATSSLQT | CQQTYSIPITF | QVQLVQSGAEVKKPGASVKVSCKA |
| | SYYM | PSGG | EWSS | SSYLA | (SEQ ID | SEQ ID NO: | SGYTFTSYYMHWVRQAPGQGLEWM |
| | H | STSY | GGVG | (SEQ | NO: | 344) | GIIDPSGGSTSYAQKFQGRVTMTR |
| | (SEQ | A | YFDY | ID NO: | 343) | | DTSTSTVYMELSSLRSEDTAVYYC |
| | ID | (SEQ | W | 342) | | | AREEWSSGGVGYFDYWGQGTLVTV |
| | NO: | ID | (SEQ | | | | SSGGGGSGGGGSGGGGSGGGGSDI |
| | 215) | NO: | ID | | | | QMTQSPSSLSASVGDRVTITCRAS |
| | | 340) | NO: | | | | QGISSYLAWYQQKPGKAPKLLIYA |
| | | | 341) | | | | TSSLQTGVPSRFSGSGSGTDFTLT |
| | | | | | | | ISSLQPEDFATYYCQQTYSIPITF |
| | | | | | | | GQGTRLEIK (SEQ ID NO: |
| | | | | | | | 345) |
| 56. | FTFD | SAIS | CARD | QASQDI | KASSLES | CQQANSYPVTF | EVQLLESGGGLVQPGGSLRLSCAA |
| | DYAM | GGGE | ASYG | RNYLN | (SEQ ID | (SEQ ID NO: | SGFTFDDYAMHWVRQAPGKGLEWV |
| | H | DTYY | GNYG | (SEQ | NO: | 348) | SAISGGGEDTYYADSVKGRFTISR |
| | (SEQ | A | MDVW | ID NO: | 347) | | DNSKNTLYLQMNSLRAEDTAVYYC |
| | ID | (SEQ | (SEQ | 280) | | | ARDASYGGNYGMDVWGQGTTVTVS |
| | NO: | ID | ID | | | | SGGGGSGGGGSGGGGSGGGGSDIQ |
| | 135) | NO: | NO: | | | | MTQSPSSLSASVGDRVTITCQASQ |
| | | 346) | 279) | | | | DIRNYLNWYQQKPGKAPKLLIYKA |
| | | | | | | | SSLESGVPSRFSGSGSGTDFTLTI |
| | | | | | | | SSLQPEDFATYYCQQANSYPVTFG |
| | | | | | | | GGTKVEIK (SEQ ID NO: |
| | | | | | | | 349) |
| 57. | YTFT | GIIN | CARD | RASQGI | AASSLQG | CQQSYSLPYTF | QVQLVQSGAEVKKPGASVKVSCKA |
| | SYYM | PSGG | SVAG | SNYFA | (SEQ ID | (SEQ ID NO: | SGYTFTSYYMHWVRQAPGQGLEWM |
| | H | STSY | TGGR | (SEQ | NO: | 353) | GIINPSGGSTSYAQKFQGRVTMTR |
| | (SEQ | A | YYGM | ID NO: | 352) | | DTSTSTVYMELSSLRSEDTAVYYC |
| | ID | (SEQ | DVW | 351) | | | ARDSVAGTGGRYYGMDVWGQGTLV |
| | NO: | ID | (SEQ | | | | TVSSGGGGSGGGGSGGGGSGGGGS |
| | 215) | NO: | ID | | | | DIQMTQSPSSLSASVGDRVTITCR |
| | | 69) | NO: | | | | ASQGISNYFAWYQQKPGKAPKLLI |
| | | | 350) | | | | YAASSLQGGVPSRFSGSGSGTDFT |
| | | | | | | | LTISSLQPEDFATYYCQQSYSLPY |
| | | | | | | | TFGQGTKLEIK (SEQ ID NO: |
| | | | | | | | 354) |
| 58. | YTFT | GIIN | CTTA | RASQGI | AASSLQS | CQQYYSNADF | QVQLVQSGAEVKKPGASVKVSCKA |
| | GYYM | PSGG | DYYY | SNYLA | (SEQ ID | (SEQ ID NO: | SGYTFTGYYMHWVRQAPGQGLEWM |
| | H | NTKY | YMDV | (SEQ | NO: 65) | 357) | GIINPSGGNTKYAQKFQGRVTMTR |
| | (SEQ | A | W | ID NO: | | | DTSTSTVYMELSSLRSEDTAVYYC |
| | ID | (SEQ | (SEQ | 218) | | | TTADYYYYMDVWGKGTTVTVSSGG |
| | NO: | ID | ID | | | | GGSGGGGSGGGGSGGGGSDIQMTQ |
| | 128) | NO: | NO: | | | | SPSSLSASVGDRVTITCRASQGIS |
| | | 355) | 356) | | | | NYLAWYQQKPGKAPKLLIYAASSL |
| | | | | | | | QSGVPSRFSGSGSGTDFTLTISSL |
| | | | | | | | QPEDFATYYCQQYYSNADFGQGTK |
| | | | | | | | VEIK (SEQ ID NO: 358) |
| 59. | FTFS | SYIS | CARD | RASQSV | SSLQS | QQYKSYPVT | EVQLLESGGGLVQPGGSLRLSCAA |
| | DFWM | GDSG | RPYY | SRSLA | (SEQ ID | (SEQ ID NO: | SGFTFSDFWMHWVRQAPGKGLEWI |
| | H | YTNY | YYMD | (SEQ | NO: | 363) | SYISGDSGYTNYADSVKGRFTISR |
| | (SEQ | A | VW | ID NO: | 362) | | DNSKNTLYLQMNSLRAEDTAVYYC |
| | ID | (SEQ | (SEQ | 361) | | | ARDRPYYYYMDVWGKGTTVTVSSG |
| | NO: | ID | ID | | | | GGGSGGGGSGGGGSGGGGSDIQMT |
| | 359) | NO: | NO: | | | | QSPSSLSASVGDRVTITCRASQSV |
| | | 170) | 360) | | | | SRSLAWYQQKPGKAPKLLIYAASS |
| | | | | | | | LQSGVPSRFSGSGSGTDFTLTISS |
| | | | | | | | LQPEDFATYYCQQYKSYPVTFGQG |
| | | | | | | | TKVEIK (SEQ ID NO: 364) |
| 60. | FTFD | SDIS | CAKD | QASQDI | SYLQS | QQAHNYPIT | EVQLLESGGGLVQPGGSLRLSCAA |
| | DYTM | GSGG | VVVA | SNYLN | (SEQ ID | (SEQ ID NO: | SGFTFDDYTMHWVRQAPGKGLEWV |
| | H | STYY | GTPL | (SEQ | NO: | 369) | SDISGSGGSTYYADSVKGRFTISR |
| | (SEQ | A | HFDY | ID NO: | 368) | | DNSKNTLYLQMNSLRAEDTAVYYC |
| | ID | (SEQ | W | 138) | | | AKDVVVAGTPLHFDYWGQGTLVTV |
| | NO: | ID | (SEQ | | | | SSGGGGSGGGGSGGGGSGGGGSDI |
| | 365) | NO: | ID | | | | QMTQSPSSLSASVGDRVTITCQAS |
| | | 366) | NO: | | | | QDISNYLNWYQQKPGKAPKLLIYA |
| | | | 367) | | | | ASYLQSGVPSRFSGSGSGTDFTLT |
| | | | | | | | ISSLQPEDFATYYCQQAHNYPITF |
| | | | | | | | GQGTRLEIK (SEQ ID NO: |
| | | | | | | | 370) |
| 61. | FTFS | ASIS | CARE | RASQSI | SSLQS | QQANAFPPT | EVQLLESGGGLVQPGGSLRLSCAA |
| | NAWM | STSA | VVGA | STWLA | (SEQ ID | (SEQ ID NO: | SEFTFSNAWMSWVRQAPGKGLEWV |
| | S | YIDY | TTFD | (SEQ | NO: | 374) | ASISSTSAYIDYADSVKGRFTISR |
| | (SEQ | A | YW | ID NO: | 362) | | DNSKNTLYLQMNSLRAEDTAVYYC |
| | ID | (SEQ | (SEQ | 373) | | | AREVVGATTFDYWGQGTLVTVSSG |
| | NO: | ID | ID | | | | GGGSGGGGSGGGGSGGGGSDIQMT |
| | 183) | NO: | NO: | | | | QSPSSLSASVGDRVTITCRASQSI |
| | | 371) | 372) | | | | STWLAWYQQKPGKAPKLLIYAASS |
| | | | | | | | LQSGVPSRFSGSGSGTDFTLTISS |
| | | | | | | | LQPEDFATYYCQQANAFPPTFGQG |
| | | | | | | | TRLEIK (SEQ ID NO: 375) |
| 62. | GTFS | GWME | CAKG | KSSQSV | STRES | QQYYSTPPT | QVQLVQSGAEVKKPGSSVKVSCKA |
| | SYAI | PHTG | GFSW | LYSSNN | (SEQ ID | (SEQ ID NO: | SGGTFSSYAISWVRQAPGQGLEWM |
| | S | NTRY | FDPW | KNYLA | NO: | 379) | GWMEPHTGNTRYAQKFQGRVTITA |
| | (SEQ | A | (SEQ | (SEQ | 378) | | DESTSTAYMELSSLRSEDTAVYYC |
| | ID | (SEQ | ID | ID NO: | | | AKGGFSWFDPWGQGTLVTVSSGGG |
| | NO: | ID | NO: | 289) | | | GSGGGGSGGGGSGGGGSDIVMTQS |
| | 77) | NO: | 377) | | | | PDSLAVSLGERATINCKSSQSVLY |
| | | 376) | | | | | SSNNKNYLAWYQQKPGQPPKLLIY |
| | | | | | | | WASTRESGVPDRFSGSGSGTDFTL |
| | | | | | | | TISSLQAEDVAVYYCQQYYSTPPT |
| | | | | | | | FGQGTRLEIK (SEQ ID NO: |
| | | | | | | | 380) |
| 63. | FTFD | ASIT | CARE | RASQGI | STRAT | QQYYTYPPT | EVQLLESGGGLVKPGGSLRLSCAA |
| | DYAM | SSSA | RVDW | SNSYLA | (SEQ ID | (SEQ ID NO: | SGFTFDDYAMHWVRQAPGKGLEWV |
| | H | FIDY | NSYF | (SEQ | NO: | 385) | ASITSSSAFIDYAASVKGRFTISR |
| | (SEQ | A | DLW | ID NO: | 384) | | DDSKNTLYLQMNSLKTEDTAVYYC |
| | ID | (SEQ | (SEQ | 383) | | | ARERVDWNSYFDLWGRGTLVTVSS |
| | NO: | ID | ID | | | | GGGGSGGGGSGGGGSGGGGSEIVM |
| | 135) | NO: | NO: | | | | TQSPATLSVSPGERATLSCRASQG |
| | | 381) | 382) | | | | ISNSYLAWYQQKPGQAPRLLIYGA |
| | | | | | | | STRATGIPARFSGSGSGTEFTLTI |
| | | | | | | | SSLQSEDFAVYYCQQYYTYPPTFG |
| | | | | | | | PGTKVDIK (SEQ ID NO: |
| | | | | | | | 386) |
| 64. | FAFS | AGTS | CARE | RASQGI | ANLEG | QQSDIFPPT | EVQLLESGGGLVKPGGSLRLSCAA |
| | SHWM | GSGE | TYYY | SNYLA | (SEQ ID | (SEQ ID NO: | SGFAFSSHWMHWVRQAPGKGLEWV |
| | H | SRDY | YYMD | (SEQ | NO: | 391) | AGTSGSGESRDYADFVKGRFTISR |
| | (SEQ | A | VW | ID NO: | 390) | | DDSKNTLYLQMNSLKTEDTAVYYC |
| | ID | (SEQ | (SEQ | 218) | | | ARETYYYYYMDVWGKGTTVTVSSG |
| | NO: | ID | ID | | | | GGGSGGGGSGGGGSGGGGSDIQMT |
| | 387) | NO: | NO: | | | | QSPSSLSASVGDRVTITCRASQGI |
| | | 388) | 389) | | | | SNYLAWYQQKPGKAPKLLIYDAAN |
| | | | | | | | LEGGVPSRFSGSGSGTDFTLTISS |
| | | | | | | | LQPEDFATYYCQQSDIFPPTFGQG |
| | | | | | | | TKVEIK (SEQ ID NO: 392) |
| 65. | YTFT | GWIN | CARE | RASQSI | SSLQS | QQSNSFPLT | QVQLVQSGAEVKKPGASVKVSCKA |
| | RHWI | VKTG | SSGW | SNYLA | (SEQ ID | (SEQ ID NO: | SGYTFTRHWIHWVRQAPGQGLEWM |
| | H | GAGY | YGTD | (SEQ | NO: | 397) | GWINVKTGGAGYAQKFQGRVTMTR |
| | (SEQ | A | VW | ID NO: | 362) | | DTSTSTVYMELSSLRSEDTAVYYC |
| | ID | (SEQ | (SEQ | 396) | | | ARESSGWYGTDVWGQGTTVTVSSG |
| | NO: | ID | ID | | | | GGGSGGGGSGGGGSGGGGSDIQMT |
| | 393) | NO: | NO: | | | | QSPSSLSASVGDRATITCRASQSI |
| | | 394) | 395) | | | | SNYLAWYQQKPGKAPKLLIYAASS |
| | | | | | | | LQSGVPSRFSGSGSGTDFTLTISS |
| | | | | | | | LQPEDFATYYCQQSNSFPLTFGGG |
| | | | | | | | TKVEIK (SEQ ID NO: 398) |
| 66. | FTFS | AAIS | CARE | QASQDI | NLRS | QQANSFPVT | EVQLLESGGGLVQPGGSLRLSCAA |
| | SYWM | YDGK | NKQW | SNFVN | (SEQ ID | (SEQ ID NO: | SGFTFSSYWMHWVRQAPGKGLEWV |
| | H | YKDY | LASF | (SEQ | NO: | 403) | AAISYDGKYKDYEDSVKGRFTISR |
| | (SEQ | E | DYW | ID NO: | 402) | | DNSKNTLYLQMNSLRAEDTAVYYC |
| | ID | (SEQ | (SEQ | 401) | | | ARENKQWLASFDYWGQGTLVTVSS |
| | NO: | ID | ID | | | | GGGGSGGGGSGGGGSGGGGSDIQM |
| | 83) | NO: | NO: | | | | TQSPSSLSASVGDRVTITCQASQD |
| | | 399) | 400) | | | | ISNFVNWYQQKPGKAPKLLIYAAN |
| | | | | | | | LRSGVPSRFSGSGSGTDFTLTISS |
| | | | | | | | LQPEDFATYYCQQANSFPVTFGPG |
| | | | | | | | TKVDIK (SEQ ID NO: 404) |

[0344] In some embodiments, the antibody comprises a CDR set as set forth in Table 6 or Table 7. In some embodiments, the antibody comprises the CDRs of Clone ID: 6, Clone ID: 59, or Clone ID: 63 of Table 6.

[0345] The antibodies, can be in a scFv format, which are also illustrated in a non-limiting embodiment in Table 6.

[0346] In some embodiments, the MAdCAM antibody is selected from the following table, which can be in a IgG format as illustrated in Table 7.

TABLE 7

| Clone | | | | | | | | |
|---|---|---|---|---|---|---|---|---|
| ID | HCDR1 | HCDR2 | HCDR3 | LCDR1 | LCDR2 | LCDR3 | VH | VK |
| 1. | FTFSS | AVISD | CTTSK | QASQD | AASSL | CQQGY | EVQLLESGGGLVQP | DIQMTQSPSSLSA |
| | YGMH | DGSDK | YYYYY | ISKSL | QS (SE | STPLT | GGSLRLSCAASGFT | SVGDRVTITCQAS |
| | (SEQ | YYA | GMDVW | N | Q ID | F | FSSYGMHWVRQAPG | QDISKSLNWYQQK |
| | ID | (SEQ | (SEQ | (SEQ | NO: | (SEQ | KGLEWVAVISDDGS | PGKAPKLLIYAAS |
| | NO: | ID | ID | ID | 65) | ID | DKYYADSVKGRFTI | SLQSGVPSRESGS |
| | 61) | NO: | NO: | NO: | | NO: | SRDNSKNTLYLQMN | GSGTDFTLTISSL |
| | | 62) | 63) | 64) | | 66) | SLRAEDTAVYYCTT | QPEDFATYYCQQG |
| | | | | | | | SKYYYYYGMDVWGQ | YSTPLTFGGGTKV |
| | | | | | | | GTTVTVSS (SEQ | EIK (SEQ ID |
| | | | | | | | ID NO: 405) | NO: 406) |
| 2. | YPFIG | GIINP | CAREG | RASQS | GASTL | CQQTW | QVQLVQSGAEVKKP | DIQMTQSPSSLSA |
| | YYLH | SGGST | RLSYG | ISSYL | ES | GPPFT | GASVKVSCKASGYP | SVGDRVTITCRAS |
| | (SEQ | SYA | MDAW | A | (SEQ | F | FIGYYLHWVRQAPG | QSISSYLAWYQQK |
| | ID | (SEQ | (SEQ | (SEQ | ID | (SEQ | QGLEWMGIINPSGG | PGKAPKLLIYGAS |
| | NO: | ID | ID | ID | NO: | ID | STSYAQKFQGRVTM | TLESGVPSRFSGS |
| | 68) | NO: | NO: | NO: | 72) | NO: | TRDTSTSTVYMELS | GSGTDFTLTISSL |
| | | 69) | 70) | 71) | | 73) | SLRSEDTAVYYCAR | QPEDFATYYCQQT |
| | | | | | | | EGRLSYGMDAWGQG | WGPPFTFGQGTKL |
| | | | | | | | TLVTVSS (SEQ | EIK (SEQ ID |
| | | | | | | | ID NO: 407) | NO: 408) |
| 3. | YPFIG | GIINP | CAREG | RASQS | GASTL | CQQTW | QVQLVQSGAEVKKP | DIQMTQSPSSLSA |
| | QYLH | SGGST | RLSYG | ISSYL | ES | GPPFT | GASVKVSCKASGYP | SVGDRVTITCRAS |
| | (SEQ | SYA | MDAW | A | (SEQ | F | FIGQYLHWVRQAPG | QSISSYLAWYQQK |
| | ID | (SEQ | (SEQ | (SEQ | ID | (SEQ | QGLEWMGIINPSGG | PGKAPKLLIYGAS |
| | NO: | ID | ID | ID | NO: | ID | STSYAQKFQGRVTM | TLESGVPSRFSGS |
| | 75) | NO: | NO: | NO: | 72) | NO: | TRDTSTSTVYMELS | GSGTDFTLTISSL |
| | | 69) | 70) | 71) | | 73) | SLRSEDTAVYYCAR | QPEDFATYYCQQT |
| | | | | | | | EGRLSYGMDAWGQG | WGPPFTFGQGTKL |
| | | | | | | | TLVTVSS (SEQ | EIK (SEQ ID |
| | | | | | | | ID NO: 409) | NO: 408) |
| 4. | GTFSS | GSINP | CAKDK | QASQD | AASSL | CQQSY | QVQLVQSGAEVKKP | DIQMTQSPSSLSA |
| | YAIS | SGDTT | AQWLV | ISNSL | QS | SSVIT | GASVKVSCKASGGT | SVGDRVTITCQAS |
| | (SEQ | SYA | GYFDY | N | (SEQ | F | FSSYAISWVRQAPG | QDISNSLNWYQQK |
| | ID | (SEQ | W | (SEQ | ID | (SEQ | QGLEWMGSINPSGD | PGKAPKLLIYAAS |
| | NO: | ID | (SEQ | ID | NO: | ID | TTSYAQKFQGRVTM | SLQSGVPSRFSGS |
| | 77) | NO: | ID | NO: | 65) | NO: | TRDTSTSTVYMELS | GSGTDFTLTISSL |
| | | 78) | NO: | 80) | | 81) | SLRSEDTAVYYCAK | QPEDFATYYCQQS |
| | | | 79) | | | | DKAQWLVGYFDYWG | YSSVITFGQGTKV |
| | | | | | | | QGTLVTVSS (SEQ | EIK (SEQ ID |
| | | | | | | | ID NO: 410) | NO: 411) |
| 5. | FTFSS | SSISP | CAREV | RASQG | GASSL | CQQAN | EVQLLESGGGLVQP | DIQMTQSPSSLSA |
| | YWMH | GGSNI | QLSHY | ISNSL | QS | SFPFT | GGSLRLSCAASGFT | SVGDRVTITCRAS |
| | (SEQ | DYA | DYW | A | (SEQ | F | FSSYWMHWVRQAPG | QGISNSLAWYQQK |
| | ID | (SEQ | (SEQ | (SEQ | ID | (SEQ | KGLEWVSSISPGGS | PGKAPKLLIYGAS |
| | NO: | ID | ID | ID | NO: | ID | NIDYADSVKGRFTI | SLQSGVPSRFSGS |
| | 83) | NO: | NO: | NO: | 87) | NO: | SRDNSKNTLYLQMN | GSGTDFTLTISSL |
| | | 84) | 85) | 86) | | 88) | SLRAEDTAVYYCAR | QPEDFATYYCQQA |
| | | | | | | | EVQLSHYDYWGQGT | NSFPFTFGQGTKV |
| | | | | | | | LVTVSS (SEQ ID | EIK (SEQ ID |
| | | | | | | | NO: 412) | NO: 413) |
| 6. | FTFNN | SRINS | CAREG | RASQI | GASSL | CQQSY | EVQLLESGGGLVQP | DIQMTQSPSSLSA |
| | YAFH | YGTST | PVAGY | IGTNL | QS | RLPFT | GGSLRLSCAASGFT | SVGDRVTITCRAS |
| | (SEQ | TYA | WYFDL | A | (SEQ | F | FNNYAFHWVRQAPG | QIIGTNLAWYQQK |
| | ID | (SEQ | W | (SEQ | ID | SEQ | KGLEWVSRINSYGT | PGKAPKLLIYGAS |
| | NO: | ID | (SEQ | ID | NO: | ID | STTYADSVKGRFTI | SLQSGVPSRESGS |
| | 90) | NO: | ID | NO: | 87) | NO: | SRDNSKNTLYLQMN | GSGTDFTLTISSL |
| | | 91) | NO: | 93) | | 94) | SLRAEDTAVYYCAR | QPEDFATYYCQQS |
| | | | 92) | | | | EGPVAGYWYFDLWG | YRLPFTFGQGTKV |
| | | | | | | | QGTLVTVSS (SEQ | EIK (SEQ ID |
| | | | | | | | ID NO: 414) | NO: 415) |
| 7. | FTFSD | AIISH | CAKPY | RASRG | STLQS | QQAYS | EVQLLESGGGLVQP | DIQMTQSPSSLSA |
| | YQMS | ADGGF | SSGWS | ITNDL | (SEQ | FPWT | GGSLRLSCAASGFT | SVGDRVTITCRAS |
| | (SEQ | KDYA | AVYYF | G | ID | (SEQ | FSDYQMSWVRQAPG | RGITNDLGWYQQK |
| | ID | (SEQ | DYW | (SEQ | NO: | ID | KGLEWVAIISHADG | PGKAPKLLIYAAS |
| | NO: | ID | (SEQ | ID | 420) | NO: | GFKDYADSVKGRFT | TLQSGVPSRFSGS |
| | 416) | NO: | ID | NO: | | 421) | ISRDNSKNTLYLQM | GSGTDFTLTISSL |
| | | 417) | NO: | 419) | | | NSLRAEDTAVYYCA | QPEDFATYYCQQA |
| | | | 418) | | | | KPYSSGWSAVYYFD | YSFPWTFGQGTKV |
| | | | | | | | YWGQGTLVTVSS | EIK (SEQ ID |
| | | | | | | | (SEQ ID NO: | NO: 423) |
| | | | | | | | 422) | |
| 8. | YTFTG | GIINP | CAKDW | RASQN | AASSL | CQQSY | QVQLVQSGAEVKKP | DIQMTQSPSSLSA |
| | YHIH | SGGST | SSWYL | ISSSL | QS | TTPYT | GASVKVSCKASGYT | SVGDRVTITCRAS |
| | (SEQ | IYA | GPFDY | N | (SEQ | F | FTGYHIHWVRQAPG | QNISSSLNWYQQK |
| | ID | (SEQ | W | (SEQ | ID | (SEQ | QGLEWMGIINPSGG | PGKAPKLLIYAAS |
| | NO: | ID | (SEQ | ID | NO: | ID | STIYAQKFQGRVTM | SLQSGVPSRFSGS |
| | 96) | NO: | ID | NO: | 65) | NO: | TRDTSTSTVYMELS | GSGTDFTLTISSL |
| | | 97) | NO: | 99) | | 100) | SLRSEDTAVYYCAK | QPEDFATYYCQQS |
| | | | 98) | | | | DWSSWYLGPFDYWG | YTTPYTFGQGTKV |
| | | | | | | | QGTLVTVSS (SEQ | EIK (SEQ ID |
| | | | | | | | ID NO: 424) | NO: 425) |
| 9. | YTFTS | GIINH | CARPY | RASQS | STLQS | QQSYS | QVQLVQSGAEVKKP | DIQMTQSPSSLSA |
| | YYMH | SGGST | SGWYF | ISSSL | (SEQ | TPLT | GASVKVSCKASGYT | SVGDRVTITCRAS |
| | (SEQ | SYA | AFDIW | N | ID | (SEQ | FTSYYMHWVRQAPG | QSISSSLNWYQQK |
| | ID | (SEQ | (SEQ | (SEQ | NO: | ID | QGLEWMGIINHSGG | PGKAPKLLIYAAS |
| | NO: | ID | ID | ID | 420) | NO: | STSYAQKFQGRVTM | TLQSGVPSRFSGS |
| | 215) | NO: | NO: | NO: | | 429) | TRDTSTSTVYMELS | GSGTDFTLTISSL |
| | | 426) | 427) | 428) | | | SLRSEDTAVYYCAR | QPEDFATYYCQQS |
| | | | | | | | PYSGWYFAFDIWGQ | YSTPLTFGQGTKV |
| | | | | | | | GTLVTVSS (SEQ | EIK (SEQ ID |
| | | | | | | | ID NO: 430) | NO: 431) |
| 10. | FMFGD | SAISG | CAKDL | RASQG | DASSL | CQQTH | EVQLLESGGGLVQP | DIQMTQSPSSLSA |
| | YAMH | SGGST | VVAGI | ISNNL | ES | SFPST | GGSLRLSCAASGFM | SVGDRVTITCRAS |
| | (SEQ | YYA | WYFDL | N | (SEQ | F | FGDYAMHWVRQAPG | QGISNNLNWYQQK |
| | ID | (SEQ | W | (SEQ | ID | (SEQ | KGLEWVSAISGSGG | PGKAPKLLIYDAS |
| | NO: | ID | (SEQ | ID | NO: | ID | STYYADSVKGRFTI | SLESGVPSRESGS |
| | 102) | NO: | ID | NO: | 106) | NO: | SRDNSKNTLYLQMN | GSGTDFTLTISSL |
| | | 103) | NO: | 105) | | 107) | SLRAEDTAVYYCAK | QPEDFATYYCQQT |
| | | | 104) | | | | DLVVAGIWYFDLWG | HSFPSTFGQGTKL |
| | | | | | | | RGTLVTVSS (SEQ | EIK (SEQ ID |
| | | | | | | | ID NO: 432) | NO: 433) |
| 11. | FTFSD | SVIGE | CAADP | RASQG | AASTL | CQQSY | EVQLLESGGGLVQP | DIQMTQSPSSLSA |
| | YYMN | SGGST | VSRWP | ISSSL | QS | STPWT | GGSLRLSCAASGFT | SVGDRVTITCRAS |
| | (SEQ | YYA | KHGGG | A | (SEQ | F | FSDYYMNWVRQAPG | QGISSSLAWYQQK |
| | ID | (SEQ | DYW | (SEQ | ID | (SEQ | KGLEWVSVIGESGG | PGKAPKLLIYAAS |
| | NO: | ID | (SEQ | ID | NO: | ID | STYYADSVKGRFTI | TLQSGVPSRFSGS |
| | | | ID | NO: | 113) | NO: | SRDNSKNTLYLQMN | GSGTDFTLTISSL |
| | 109) | NO: | NO: | 112) | | 114) | SLRAEDTAVYYCAA | QPEDFATYYCQQS |
| | | 110) | 111) | | | | DPVSRWPKHGGGDY | YSTPWTFGQGTKV |
| | | | | | | | WGQGTLVTVSS | EIK (SEQ ID |
| | | | | | | | (SEQ ID NO: | NO: 435) |
| | | | | | | | 434) | |
| 12. | YTLTT | GWINP | CAKGD | RASDN | AASSL | CQQGY | QVQLVQSGAEVKKP | DIQMTQSPSSLSA |
| | WYMY | NRGAT | LWGAM | IGSWL | QS | STPPT | GASVKVSCKASGYT | SVGDRVTITCRAS |
| | (SEQ | NYA | DVW | A | (SEQ | F | LTTWYMYWVRQAPG | DNIGSWLAWYQQK |
| | ID | (SEQ | (SEQ | (SEQ | ID | (SEQ | QGLEWMGWINPNRG | PGKAPKLLIYAAS |
| | NO: | ID | ID | ID | NO: | ID | ATNYAQKFQGRVTM | SLQSGVPSRESGS |
| | 116) | NO: | NO: | NO: | 65) | NO: | TRDTSTSTVYMELS | GSGTDFTLTISSL |
| | | 117) | 118) | 119) | | 120) | SLRSEDTAVYYCAK | QPEDFATYYCQQG |
| | | | | | | | GDLWGAMDVWGQGT | YSTPPTFGQGTKV |
| | | | | | | | LVTVSS (SEQ ID | EIK (SEQ ID |
| | | | | | | | NO: 436) | NO: 437) |
| 13. | YTFTT | GGFDP | CARHA | RASES | AASTL | CQQSY | QVQLVQSGAEVKKP | DIQMTQSPSSLSA |
| | YYMH | EDGET | VAGAV | ISNWL | QS | SVPFT | GASVKVSCKASGYT | SVGDRVTITCRAS |
| | (SEQ | IYA | GAGYY | A | (SEQ | F | FTTYYMHWVRQAPG | ESISNWLAWYQQK |
| | ID | (SEQ | YYGMD | (SEQ | ID | (SEQ | QGLEWMGGFDPEDG | PGKAPKLLIYAAS |
| | NO: | ID | VW | ID | NO: | ID | ETIYAQKFQGRVTM | TLQSGVPSRFSGS |
| | 122) | NO: | (SEQ | NO: | 113) | NO: | TRDTSTSTVYMELS | GSGTDFTLTISSL |
| | | 123) | ID | 125) | | 126) | SLRSEDTAVYYCAR | QPEDFATYYCQQS |
| | | | NO: | | | | HAVAGAVGAGYYYY | YSVPFTFGPGTKV |
| | | | 124) | | | | GMDVWGQGTMVTVS | DIK (SEQ ID |
| | | | | | | | S (SEQ ID NO: | NO: 439) |
| | | | | | | | 438) | |
| 14. | YTFTN | GGIIP | CAKGQ | QANQD | SKLEA | QQSSE | QVQLVQSGAEVKKP | DIQMTQSPSSLSA |
| | YYMH | IVDGV | FTGNY | ISNYL | (SEQ | IPYS | GSSVKVSCKASGYT | SVGDRVTITCQAN |
| | (SEQ | KYA | YYGMD | N | ID | (SEQ | FTNYYMHWVRQAPG | QDISNYLNWYQQK |
| | ID | (SEQ | YW | (SEQ | NO: | ID | QGLEWMGGIIPIVD | PGKAPKLLIYRAS |
| | NO: | ID | (SEQ | ID | 442) | NO: | GVKYAQKFQGRVTI | KLEAGVPSRFSGS |
| | 148) | NO: | ID | NO: | | 443) | TADESTSTAYMELS | GSGTDFTLTISSL |
| | | 440) | NO: | 151) | | | SLRSEDTAVYYCAK | QPEDFATYYCQQS |
| | | | 441) | | | | GQFTGNYYYGMDYW | SEIPYSFGQGTKV |
| | | | | | | | GQGTLVTVSS | EIK (SEQ ID |
| | | | | | | | (SEQ ID NO: | NO: 445) |
| | | | | | | | 444) | |
| 15. | YTFTG | GWIGP | CARDL | RSSQS | SSSNR | CMQAL | QVQLVQSGAEVKKP | DIVMTQSPLSLPV |
| | YYMH | NSGDT | DHNWY | LLHSN | AP | HIPLT | GASVKVSCKASGYT | TPGEPASISCRSS |
| | (SEQ | NYA | FDLW | GYNYL | (SEQ | F | FTGYYMHWVRQAPG | QSLLHSNGYNYLD |
| | ID | (SEQ | (SEQ | D | ID | (SEQ | QGLEWMGWIGPNSG | WYLQKPGQSPQLL |
| | NO: | ID | ID | (SEQ | NO: | ID | DTNYAQKFQGRVTM | IYSSSNRAPGVPD |
| | 128) | NO: | NO: | ID | 132) | NO: | TRDTSTSTVYMELS | RFSGSGSGTDFTL |
| | | 129) | 130) | NO: | | 133) | SLRSEDTAVYYCAR | KISRVEAEDVGVY |
| | | | | 131) | | | DLDHNWYFDLWGRG | YCMQALHIPLTFG |
| | | | | | | | TLVTVSS (SEQ | GGTKVEIK (SEQ |
| | | | | | | | ID NO: 446) | ID NO: 447) |
| 16. | FTFDD | SYIDA | CAKDQ | QASQD | KASTL | CQQSY | EVQLLESGGGLVQP | DIQMTQSPSSLSA |
| | YAMH | SGTTI | AAAGY | ISNYL | ES | STPIT | GGSLRLSCAASGFT | SVGDRVTITCQAS |
| | (SEQ | YYA | WYFDL | N | (SEQ | F | FDDYAMHWVRQAPG | QDISNYLNWYQQK |
| | ID | (SEQ | W | (SEQ | ID | (SEQ | KGLEWVSYIDASGT | PGKAPKLLIYKAS |
| | NO: | ID | (SEQ | ID | NO: | ID | TIYYADSVKGRFTI | TLESGVPSRFSGS |
| | 135) | NO: | ID | NO: | 139) | NO: | SRDNSKNTLYLQMN | GSGTDFTLTISSL |
| | | 136) | NO: | 138) | | 140) | SLRAEDTAVYYCAK | QPEDFATYYCQQS |
| | | | 137) | | | | DQAAAGYWYFDLWG | YSTPITFGQGTRL |
| | | | | | | | RGTLVTVSS (SEQ | EIK (SEQ ID |
| | | | | | | | ID NO: 448) | NO: 449) |
| 17. | YTFTD | GGIVP | CAKDE | RSSQS | SAYNR | CMQAL | QVQLVQSGAEVKKP | DIVMTQSPLSLPV |
| | YHIH | RSGST | SSGWY | LLHSN | AS | QTPLT | GSSVKVSCKASGYT | TPGEPASISCRSS |
| | (SEQ | TYA | YFDYW | GYNYL | (SEQ | F | FTDYHIHWVRQAPG | QSLLHSNGYNYLD |
| | ID | (SEQ | (SEQ | D | ID | (SEQ | QGLEWMGGIVPRSG | WYLQKPGQSPQLL |
| | NO: | ID | ID | (SEQ | NO: | ID | STTYAQKFQGRVTI | IYSAYNRASGVPD |
| | 142) | NO: | NO: | ID | 145) | NO: | TADESTSTAYMELS | RFSGSGSGTDFTL |
| | | 143) | 144 | NO: | | 146) | SLRSEDTAVYYCAK | KISRVEAEDVGVY |
| | | | | 131) | | | DESSGWYYFDYWGQ | YCMQALQTPLTFG |
| | | | | | | | GTLVTVSS (SEQ | QGTKVEIK (SEQ |
| | | | | | | | ID NO: 450) | ID NO: 451) |
| 18. | YTFTN | GGIIP | CAKGR | QANQD | RASKL | CQQSS | QVQLVQSGAEVKKP | DIQMTQSPSSLSA |
| | YYMH | IVDRV | YTVNY | ISNYL | EA | EIPYS | GSSVKVSCKASGYT | SVGDRVTITCQAN |
| | (SEQ | KYA | YYGMD | N | (SEQ | F | FTNYYMHWVRQAPG | QDISNYLNWYQQK |
| | ID | (SEQ | VW | (SEQ | ID | (SEQ | QGLEWMGGIIPIVD | PGKAPKLLIYRAS |
| | NO: | ID | (SEQ | ID | NO: | ID | RVKYAQKFQGRVTI | KLEAGVPSRESGS |
| | 148) | NO: | ID | NO: | 152) | NO: | TADESTSTAYMELS | GSGTDFTLTISSL |
| | | 149) | NO: | 151) | | 153) | SLRSEDTAVYYCAK | QPEDFATYYCQQS |
| | | | 150) | | | | GRYTVNYYYGMDVW | SEIPYSFGQGTKL |
| | | | | | | | GQGTTVTVSS | EIK (SEQ ID |
| | | | | | | | (SEQ ID NO: | NO: 453) |
| | | | | | | | 452) | |
| 19. | FTFED | SYLNS | CAKDY | RASQS | DASNL | CQQSY | EVQLLESGGGLVQP | DIQMTQSPSSLSA |
| | YAMH | DGGST | CTNGV | ISTYL | ET | TIPIT | GGSLRLSCAASGFT | SVGDRVTITCRAS |
| | (SEQ | SYA | CAFDY | N | (SEQ | F | FEDYAMHWVRQAPG | QSISTYLNWYQQK |
| | ID | (SEQ | W | (SEQ | ID | (SEQ | KGLEWVSYLNSDGG | PGKAPKLLIYDAS |
| | NO: | ID | (SEQ | ID | NO: | ID | STSYADSVKGRFTI | NLETGVPSRFSGS |
| | 155) | NO: | ID | NO: | 159) | NO: | SRDNSKNTLYLQMN | GSGTDFTLTISSL |
| | | 156) | NO: | 158) | | 160) | SLRAEDTAVYYCAK | QPEDFATYYCQQS |
| | | | 157) | | | | DYCTNGVCAFDYWG | YTIPITFGQGTRL |
| | | | | | | | QGTLVTVSS (SEQ | EIK (SEQ ID |
| | | | | | | | ID NO: 454) | NO: 455) |
| 20. | FTFSD | SAISG | CVSDI | RASQS | AASRL | CQQAN | EVQLLESGGGLVQP | DIQMTQSPSSLSA |
| | SAMH | SGSTI | AVAGH | ISTFL | EG | SFPLT | GGSLRLSCAASGFT | SVGDRVTITCRAS |
| | (SEQ | YYA | WYFDL | N | (SEQ | F | FSDSAMHWVRQAPG | QSISTFLNWYQQK |
| | ID | (SEQ | W | (SEQ | ID | (SEQ | KGLEWVSAISGSGS | PGKAPKLLIYAAS |
| | NO: | ID | (SEQ | ID | NO: | ID | TIYYADSVKGRFTI | RLEGGVPSRFSGS |
| | 162) | NO: | ID | NO: | 166) | NO: | SRDNSKNTLYLQMN | GSGTDFTLTISSL |
| | | 163) | NO: | 165) | | 167) | SLRAEDTAVYYCVS | QPEDFATYYCQQA |
| | | | 164) | | | | DIAVAGHWYFDLWG | NSFPLTFGPGTKV |
| | | | | | | | RGTLVTVSS (SEQ | DIK (SEQ ID |
| | | | | | | | ID NO: 456) | NO: 457) |
| 21. | FTFSS | SYISG | CARAN | RASQS | AASSL | CQQSY | EVQLVESGGGLVKP | DIQMTQSPSSLSA |
| | YWMS | DSGYT | SSGWY | ISSYL | QS | STPLT | GGSLRLSCAASGFT | SVGDRVTITCRAS |
| | (SEQ | NYA | DWYFD | N | (SEQ | F | FSSYWMSWVRQAPG | QSISSYLNWYQQK |
| | ID | (SEQ | LW | (SEQ | ID | (SEQ | KGLEWVSYISGDSG | PGKAPKLLIYAAS |
| | NO: | ID | (SEQ | ID | NO: | ID | YTNYAAPVKGRFTI | SLQSGVPSRFSGS |
| | 169) | NO: | ID | NO: | 65) | NO: | SRDDSKNTLYLQMN | GSGTDFTLTISSL |
| | | 170) | NO: | 172) | | 173) | SLKTEDTAVYYCAR | QPEDFATYYCQQS |
| | | | 171) | | | | ANSSGWYDWYFDLW | YSTPLTFGGGTKV |
| | | | | | | | GRGTLVTVSS | EIK (SEQ ID |
| | | | | | | | (SEQ ID NO: | NO: 459) |
| | | | | | | | 458) | |
| 22. | FTFDD | SGISW | CAKDI | QASQD | DASNL | CQQSY | EVQLLESGGGLVQP | DIQMTQSPSSLSA |
| | YAMH | NSGSI | VAAGH | ISNYL | ET | STPLT | GGSLRLSCAASGET | SVGDRVTITCQAS |
| | (SEQ | GYA | YYYGM | N | (SEQ | F | FDDYAMHWVRQAPG | QDISNYLNWYQQK |
| | ID | (SEQ | DVW | (SEQ | ID | (SEQ | KGLEWVSGISWNSG | PGKAPKLLIYDAS |
| | NO: | ID | (SEQ | ID | NO: | ID | SIGYADSVKGRFTI | NLETGVPSRFSGS |
| | 135) | NO: | ID | NO: | 159) | NO: | SRDNSKNTLYLQMN | GSGTDFTLTISSL |
| | | 175) | NO: | 138) | | 173) | SLRAEDTAVYYCAK | QPEDFATYYCQQS |
| | | | 176) | | | | DIVAAGHYYYGMDV | YSTPLTFGGGTKV |
| | | | | | | | WGQGTTVTVSS | EIK (SEQ ID |
| | | | | | | | (SEQ ID NO: | NO: 461) |
| | | | | | | | 460) | |
| 23. | FTFDD | SYIDT | CARDE | QAGQD | DASNL | CQQTY | EVQLLESGGGLVQP | DIQMTQSPSSLSA |
| | YAMH | SSSHL | AAAGY | ISNYL | ET | STPIT | GGSLRLSCAASGFT | SVGDRVTITCQAG |
| | (SEQ | YYA | YGMDV | N | (SEQ | F | FDDYAMHWVRQAPG | QDISNYLNWYQQK |
| | ID | (SEQ | W | (SEQ | ID | (SEQ | KGLEWVSYIDTSSS | PGKAPKLLIYDAS |
| | NO: | ID | (SEQ | ID | NO: | ID | HLYYADSVKGRFTI | NLETGVPSRFSGS |
| | 135) | NO: | ID | NO: | 159) | NO: | SRDNSKNTLYLQMN | GSGTDFTLTISSL |
| | | 178) | NO: | 180) | | 181) | SLRAEDTAVYYCAR | QPEDFATYYCQQT |
| | | | 179) | | | | DEAAAGYYGMDVWG | YSTPITFGQGTKL |
| | | | | | | | QGTTVTVSS (SEQ | EIK (SEQ ID |
| | | | | | | | ID NO: 462) | NO: 463) |
| 24. | FTFSS | SRISS | CARGT | RASQS | SNLQS | QQSYS | EVQLVESGGGLVKP | DIQMTQSPSSLSA |
| | YWMS | DGRIT | SYCTG | IGRNL | (SEQ | IPLT | GGSLRLSCAASGET | SVGDRVTITCRAS |
| | (SEQ | TYA | GVCDI | N | ID | (SEQ | FSSYWMSWVRQAPG | QSIGRNLNWYQQK |
| | ID | (SEQ | DYW | (SEQ | NO: | ID | KGLEWVSRISSDGR | PGKAPKLLIYSAS |
| | NO: | ID | (SEQ | ID | 467) | NO: | ITTYAAPVKGRFTI | NLQSGVPSRFSGS |
| | 169) | NO: | ID | NO: | | 468) | SRDDSKNTLYLQMN | GSGTDFTLTISSL |
| | | 464) | NO: | 466) | | | SLKTEDTAVYYCAR | QPEDFATYYCQQS |
| | | | 465) | | | | GTSYCTGGVCDIDY | YSIPLTFGPGTKV |
| | | | | | | | WGQGTLVTVSS | DIK (SEQ ID |
| | | | | | | | (SEQ ID NO: | NO: 470) |
| | | | | | | | 469) | |
| 25. | FTFSN | STIVG | CARDN | RASQD | AASSL | CQQSY | EVQLLESGGGLVQP | DIQMTQSPSSLSA |
| | AWMS | NGGAT | PLRWQ | ISNYL | QS | SIPPT | GGSLRLSCAASGFT | SVGDRVTITCRAS |
| | (SEQ | YYA | GMDVW | N | (SEQ | F | FSNAWMSWVRQAPG | QDISNYLNWYQQK |
| | ID | (SEQ | (SEQ | (SEQ | ID | (SEQ | KGLEWVSTIVGNGG | PGKAPKLLIYAAS |
| | NO: | ID | ID | ID | NO: | ID | ATYYADSVKGRFTI | SLQSGVPSRFSGS |
| | 183) | NO: | NO: | NO: | 65) | NO: | SRDNSKNTLYLQMN | GSGTDFTLTISSL |
| | | 184) | 185) | 186) | | 187) | SLRAEDTAVYYCAR | QPEDFATYYCQQS |
| | | | | | | | DNPLRWQGMDVWGQ | YSIPPTFGPGTKV |
| | | | | | | | GTLVTVSS (SEQ | DIK (SEQ ID |
| | | | | | | | ID NO: 471) | NO: 472) |
| 26. | FTFSS | SYISS | CARAN | RASQS | SGLQS | QQSYS | EVQLLESGGGLVQP | DIQMTQSPSSLSA |
| | YAMS | SSTYT | SSSWY | ISSYL | (SEQ | TPLT | GGSLRLSCAASGFT | SVGDRVTITCRAS |
| | (SEQ | NYA | DWYFD | N | ID | (SEQ | FSSYAMSWVRQAPG | QSISSYLNWYQQK |
| | ID | (SEQ | LW | (SEQ | NO: | ID | KGLEWVSYISSSST | PGKAPKLLIYAAS |
| | NO: | ID | (SEQ | ID | 474) | NO: | YTNYADSVKGRFTI | GLQSGVPSRFSGS |
| | 473) | NO: | ID | NO: | | 429) | SRDNSKNTLYLQMN | GSGTDFTLTISSL |
| | | 190) | NO: | 172) | | | SLRAEDTAVYYCAR | QPEDFATYYCQQS |
| | | | 191) | | | | ANSSSWYDWYFDLW | YSTPLTFGGGTKV |
| | | | | | | | GQGTLVTVSS | EIK (SEQ ID |
| | | | | | | | (SEQ ID NO: | NO: 476) |
| | | | | | | | 475) | |
| 27. | FTFSS | SYISS | CARAN | RASQS | SGLQS | QQSYS | EVQLLESGGGLVQP | DIQMTQSPSSLSA |
| | YQMS | SSTYT | SSSWY | ISSYL | (SEQ | TPLT | GGSLRLSCAASGFT | SVGDRVTITCRAS |
| | (SEQ | NYA | DWYFD | N | ID | (SEQ | FSSYQMSWVRQAPG | QSISSYLNWYQQK |
| | ID | (SEQ | LW | (SEQ | NO: | ID | KGLEWVSYISSSST | PGKAPKLLIYAAS |
| | NO: | ID | (SEQ | ID | 474) | NO: | YTNYADSVKGRFTI | GLQSGVPSRFSGS |
| | 189) | NO: | ID | NO: | | 429) | SRDNSKNTLYLQMN | GSGTDFTLTISSL |
| | | 190) | NO: | 172) | | | SLRAEDTAVYYCAR | QPEDFATYYCQQS |
| | | | 191) | | | | ANSSSWYDWYFDLW | YSTPLTFGGGTKV |
| | | | | | | | GQGTLVTVSS | EIK (SEQ ID |
| | | | | | | | (SEQ ID NO: | NO: 476) |
| | | | | | | | 477) | |
| 28. | FTFSS | SYISS | CARAN | RASQS | SSLQS | QQSYS | EVQLLESGGGLVQP | DIQMTQSPSSLSA |
| | YAMS | SSTYT | SSSWY | ISSYL | (SEQ | TPLT | GGSLRLSCAASGFT | SVGDRVTITCRAS |
| | (SEQ | NYA | DWYFD | N | ID | (SEQ | FSSYAMSWVRQAPG | QSISSYLNWYQQK |
| | ID | (SEQ | LW | (SEQ | NO: | ID | KGLEWVSYISSSST | PGKAPKLLIYAAS |
| | NO: | ID | (SEQ | ID | 362) | NO: | YTNYADSVKGRFTI | SLQSGVPSRESGS |
| | 473) | NO: | ID | NO: | | 429) | SRDNSKNTLYLQMN | GSGTDFTLTISSL |
| | | 190) | NO: | 172) | | | SLRAEDTAVYYCAR | QPEDFATYYCQQS |
| | | | 191) | | | | ANSSSWYDWYFDLW | YSTPLTFGGGTKV |
| | | | | | | | GQGTLVTVSS | EIK (SEQ ID |
| | | | | | | | (SEQ ID NO: | NO: 459) |
| | | | | | | | 475) | |
| 29. | FTFSS | SYISS | CARAN | RASQS | AASSL | CQQSY | EVQLLESGGGLVQP | DIQMTQSPSSLSA |
| | YQMS | SSTYT | SSSWY | ISSYL | QS | STPLT | GGSLRLSCAASGFT | SVGDRVTITCRAS |
| | (SEQ | NYA | DWYFD | N | (SEQ | F | FSSYQMSWVRQAPG | QSISSYLNWYQQK |
| | ID | (SEQ | LW | (SEQ | ID | (SEQ | KGLEWVSYISSSST | PGKAPKLLIYAAS |
| | NO: | ID | (SEQ | ID | NO: | ID | YTNYADSVKGRFTI | SLQSGVPSRESGS |
| | 189) | NO: | ID | NO: | 65) | NO: | SRDNSKNTLYLQMN | GSGTDFTLTISSL |
| | | 190) | NO: | 172) | | 173) | SLRAEDTAVYYCAR | QPEDFATYYCQQS |
| | | | 191) | | | | ANSSSWYDWYFDLW | YSTPLTFGGGTKV |
| | | | | | | | GQGTLVTVSS | EIK (SEQ ID |
| | | | | | | | (SEQ ID NO: | NO: 459) |
| | | | | | | | 477) | |
| 30. | FTFSS | SGISG | CATSQ | RASQS | AASNL | CQQSY | EVQLLESGGGLVQP | DIQMTQSPSSLSA |
| | YAMH | SGGSA | APVDY | ISSWL | QR | SIPIT | GGSLRLSCAASGFT | SVGDRVTITCRAS |
| | (SEQ | YYA | YYYGM | A | (SEQ | F | FSSYAMHWVRQAPG | QSISSWLAWYQQK |
| | ID | (SEQ | DVW | (SEQ | ID | (SEQ | KGLEWVSGISGSGG | PGKAPKLLIYAAS |
| | NO: | ID | (SEQ | ID | NO: | ID | SAYYADSVKGRFTI | NLQRGVPSRFSGS |
| | 193) | NO: | ID | NO: | 197) | NO: | SRDNSKNTLYLQMN | GSGTDFTLTISSL |
| | | 194) | NO: | 196) | | 198) | SLRAEDTAVYYCAT | QPEDFATYYCQQS |
| | | | 195) | | | | SQAPVDYYYYGMDV | YSIPITFGQGTKV |
| | | | | | | | WGQGTTVTVSS | EIK (SEQ ID |
| | | | | | | | (SEQ ID NO: | NO: 479) |
| | | | | | | | 478) | |
| 31. | FTFSS | SYISG | CARVG | RASQS | AASSL | CQQSY | EVQLVESGGGLVKP | DIQMTQSPSSLSA |
| | YWMS | SSSYT | SSGWY | ISSYL | QS | STPLT | GGSLRLSCAASGFT | SVGDRVTITCRAS |
| | (SEQ | NYA | DWYFD | N | (SEQ | F | FSSYWMSWVRQAPG | QSISSYLNWYQQK |
| | ID | (SEQ | LW | (SEQ | ID | (SEQ | KGLEWVSYISGSSS | PGKAPKLLIYAAS |
| | NO: | ID | (SEQ | ID | NO: | ID | YTNYAAPVKGRFTI | SLQSGVPSRFSGS |
| | 169) | NO: | ID | NO: | 65) | NO: | SRDDSKNTLYLQMN | GSGTDFTLTISSL |
| | | 200) | NO: | 172) | | 173) | SLKTEDTAVYYCAR | QPEDFATYYCQQS |
| | | | 201) | | | | VGSSGWYDWYFDLW | YSTPLTFGQGTKV |
| | | | | | | | GRGTLVTVSS | EIK (SEQ ID |
| | | | | | | | (SEQ ID NO: | NO: 481) |
| | | | | | | | 480) | |
| 32. | YTLTT | GWINP | CAKGD | RASDN | AASSL | CQQGY | QVQLVQSGAEVKKP | DIQMTQSPSSLSA |
| | WYMY | NRGAT | LWGAM | IGSWL | QS | STPPT | GASVKVSCKASGYT | SVGDRVTITCRAS |
| | (SEQ | NYA | DVW | A | (SEQ | F | LTTWYMYWVRQAPG | DNIGSWLAWYQQK |
| | ID | (SEQ | (SEQ | (SEQ | ID | (SEQ | QGLEWMGWINPNRG | PGKAPKLLIYAAS |
| | NO: | ID | ID | ID | NO: | ID | ATNYAQKFQGRVTM | SLQSGVPSRFSGS |
| | 116) | NO: | NO: | NO: | 65) | NO: | TRDTSTSTVYMELS | GSGTDFTLTISSL |
| | | 117) | 118) | 119) | | 120) | SLRSEDTAVYYCAK | QPEDFATYYCQQG |
| | | | | | | | GDLWGAMDVWGQGT | YSTPPTFGQGTKV |
| | | | | | | | LVTVSS (SEQ ID | EIK (SEQ ID |
| | | | | | | | NO: 436) | NO: 437) |
| 33. | YTLTT | GWINP | CAKGD | RASDN | AASSL | CQQGY | QVQLVQSGAEVKKP | DIQMTQSPSSLSA |
| | WYMY | NRGAT | LWGAM | IGSWL | QS | STPPT | GASVKVSCKASGYT | SVGDRVTITCRAS |
| | (SEQ | NYA | DVW | A | (SEQ | F | LTTWYMYWVRQAPG | DNIGSWLAWYQQK |
| | ID | (SEQ | (SEQ | (SEQ | ID | (SEQ | QGLEWMGWINPNRG | PGKAPKLLIYAAS |
| | NO: | ID | ID | ID | NO: | ID | ATNYAQKFQGRVTM | SLQSGVPSRFSGS |
| | 116) | NO: | NO: | NO: | 65) | NO: | TRDTSTSTVYMELS | GSGTDFTLTISSL |
| | | 117) | 118) | 119) | | 120) | SLRSEDTAVYYCAK | QPEDFATYYCQQG |
| | | | | | | | GDLWGAMDVWGQGT | YSTPPTFGQGTKV |
| | | | | | | | TVTVSS (SEQ ID | EIK (SEQ ID |
| | | | | | | | NO: 482) | NO: 437) |
| 34. | YTFTG | GWMNP | CARDP | RASQS | AASSL | CQQSY | QVQLVQSGAEVKKP | DIQMTQSPSSLSA |
| | YYIH | NSGNT | GFLGY | ISSYL | QS | TAPYT | GASVKVSCKASGYT | SVGDRVTITCRAS |
| | (SEQ | GYA | CSGGS | H | (SEQ | F | FTGYYIHWVRQAPG | QSISSYLHWYQQK |
| | ID | (SEQ | CYDGW | (SEQ | ID | (SEQ | QGLEWMGWMNPNSG | PGKAPKLLIYAAS |
| | NO: | ID | FDPW | ID | NO: | ID | NTGYAQKFQGRVTM | SLQSGVPSRESGS |
| | 204) | NO: | (SEQ | NO: | 65) | NO: | TRDTSTSTVYMELS | GSGTDFTLTISSL |
| | | 205) | ID | 207) | | 208) | SLRSEDTAVYYCAR | QPEDFATYYCQQS |
| | | | NO: | | | | DPGFLGYCSGGSCY | YTAPYTFGQGTKL |
| | | | 206) | | | | DGWFDPWGQGTLVT | EIK (SEQ ID |
| | | | | | | | VSS (SEQ ID | NO: 484) |
| | | | | | | | NO: 483) | |
| 35. | YTFTG | GWMNP | CARDP | RASQS | AASSL | CQQSY | QVQLVQSGAEVKKP | DIQMTQSPSSLSA |
| | YYIH | NSGNT | GFLGY | ISSYL | QS | TAPYT | GASVKVSCKASGYT | SVGDRVTITCRAS |
| | (SEQ | GYA | SSGGS | H | (SEQ | F | FTGYYIHWVRQAPG | QSISSYLHWYQQK |
| | ID | (SEQ | CYDGW | (SEQ | ID | (SEQ | QGLEWMGWMNPNSG | PGKAPKLLIYAAS |
| | NO: | ID | FDPW | ID | NO: | ID | NTGYAQKFQGRVTM | SLQSGVPSRFSGS |
| | 204) | NO: | (SEQ | NO: | 65) | NO: | TRDTSTSTVYMELS | GSGTDFTLTISSL |
| | | 205) | ID | 207) | | 208) | SLRSEDTAVYYCAR | QPEDFATYYCQQS |
| | | | NO: | | | | DPGFLGYSSGGSSY | YTAPYTFGQGTKL |
| | | | 485) | | | | DGWFDPWGQGTLVT | EIK (SEQ ID |
| | | | | | | | VSS (SEQ ID | NO: 484) |
| | | | | | | | NO: 486) | |
| 36. | FTFDD | SAISG | CARDG | QASQD | SNLET | QQSYS | EVQLLESGGGLVQP | DIQMTQSPSSLSA |
| | YALH | DGRST | TVNGA | ISKYL | (SEQ | IPFT | GGSLRLSCAASGFT | SVGDRVTITCQAS |
| | (SEQ | TYA | TGWFD | N | ID | (SEQ | FDDYALHWVRQAPG | QDISKYLNWYQQK |
| | ID | (SEQ | PW | (SEQ | NO: | ID | KGLEWVSAISGDGR | PGKAPKLLIYDAS |
| | NO: | ID | (SEQ | ID | 491) | NO: | STTYADSVKGRFTI | NLETGVPSRFSGS |
| | 487) | NO: | ID | NO: | | 492) | SRDNSKNTLYLQMN | GSGTDFTLTISSL |
| | | 488) | NO: | 490) | | | SLRAEDTAVYYCAR | QPEDFATYYCQQS |
| | | | 489) | | | | DGTVNGATGWFDPW | YSIPFTFGPGTKV |
| | | | | | | | GQGTLVTVSS | DIK (SEQ ID |
| | | | | | | | (SEQ ID NO: | NO: 494) |
| | | | | | | | 493) | |
| 37. | FTFSD | SAISG | CARDG | RASQG | SNLET | QQSYS | EVQLLESGGGLVQP | DIQMTQSPSSLSA |
| | YGMP | SGGST | GWQPA | ISNNL | (SEQ | TPLT | GGSLRLSCAASGFT | SVGDRVTITCRAS |
| | (SEQ | YYA | AILDY | N | ID | (SEQ | FSDYGMPWVRQAPG | QGISNNLNWYQQK |
| | ID | (SEQ | W | (SEQ | NO: | ID | KGLEWVSAISGSGG | PGKAPKLLIYDAS |
| | NO: | ID | (SEQ | ID | 491) | NO: | STYYADSVKGRFTI | NLETGVPSRESGS |
| | 495) | NO: | ID | NO: | | 429) | SRDNSKNTLYLQMN | GSGTDFTLTISSL |
| | | 103) | NO: | 105) | | | SLRAEDTAVYYCAR | QPEDFATYYCQQS |
| | | | 296 | | | | DGGWQPAAILDYWG | YSTPLTFGQGTKV |
| | | | | | | | QGTLVTVSS (SEQ | EIK (SEQ ID |
| | | | | | | | ID NO: 496) | NO: 497) |
| 38. | YTFTD | GWMNP | CAREG | RASQG | DASNL | CQQSY | QVQLVQSGAEVKKP | DIQMTQSPSSLSA |
| | YFLH | TSGNT | EGSGF | INSWL | ET | STPLT | GASVKVSCKASGYT | SVGDRVTITCRAS |
| | (SEQ | GYA | DYW | A | (SEQ | F | FTDYFLHWVRQAPG | QGINSWLAWYQQK |
| | ID | (SEQ | (SEQ | (SEQ | ID | (SEQ | QGLEWMGWMNPTSG | PGKAPKLLIYDAS |
| | NO: | ID | ID | ID | NO: | ID | NTGYAQKFQGRVTM | NLETGVPSRFSGS |
| | 210) | NO: | NO: | NO: | 159) | NO: | TRDTSTSTVYMELS | GSGTDFTLTISSL |
| | | 211) | 212 | 213) | | 173) | SLRSEDTAVYYCAR | QPEDFATYYCQQS |
| | | | | | | | EGEGSGFDYWGQGT | YSTPLTFGGGTKV |
| | | | | | | | LVTVSS (SEQ ID | EIK (SEQ ID |
| | | | | | | | NO: 498) | NO: 499) |
| 39. | YTFTS | AWMNP | CARDY | RASQG | AASSL | CQQSY | QVQLVQSGAEVKKP | DIQMTQSPSSLSA |
| | YYMH | NSGNT | DFWSG | ISNYL | QS | STPWT | GASVKVSCKASGYT | SVGDRVTITCRAS |
| | (SEQ | GYA | SLGYW | A | (SEQ | F | FTSYYMHWVRQAPG | QGISNYLAWYQQK |
| | ID | (SEQ | (SEQ | (SEQ | ID | (SEQ | QGLEWMAWMNPNSG | PGKAPKLLIYAAS |
| | NO: | ID | ID | ID | NO: | ID | NTGYAQKFQGRVTM | SLQSGVPSRESGS |
| | 215) | NO: | NO: | NO: | 65) | NO: | TRDTSTSTVYMELS | GSGTDFTLTISSL |
| | | 216) | 217) | 218) | | 114) | SLRSEDTAVYYCAR | QPEDFATYYCQQS |
| | | | | | | | DYDFWSGSLGYWGQ | YSTPWTFGQGTKV |
| | | | | | | | GTLVTVSS (SEQ | EIK (SEQ ID |
| | | | | | | | ID NO: 500) | NO: 501) |
| 40. | YTLTT | GWINP | CAKGD | RASDN | AASSL | CQQGY | QVQLVQSGAEVKKP | DIQMTQSPSSLSA |
| | WYMY | NRGAT | LWGAM | IGSWL | QS | STPPT | GASVKVSCKASGYT | SVGDRVTITCRAS |
| | (SEQ | NYA | DVW | A | (SEQ | F | LTTWYMYWVRQAPG | DNIGSWLAWYQQK |
| | ID | (SEQ | (SEQ | (SEQ | ID | (SEQ | QGLEWMGWINPNRG | PGKAPKLLIYAAS |
| | NO: | ID | ID | ID | NO: | ID | ATNYAQKFQGRVTM | SLQSGVPSRFSGS |
| | 116) | NO: | NO: | NO: | 65) | NO: | TRDTSTSTVYMELS | GSGTDFTLTISSL |
| | | 117) | 118) | 119) | | 120) | SLRSEDTAVYYCAK | QPEDFATYYCQQG |
| | | | | | | | GDLWGAMDVWGQGT | YSTPPTFGQGTKV |
| | | | | | | | LVTVSS (SEQ ID | EIK (SEQ ID |
| | | | | | | | NO: 436) | NO: 437) |
| 41. | YTFTS | GIINP | CARDT | RASQS | DASNL | CQQSY | QVQLVQSGAEVKKP | DIQMTQSPSSLSA |
| | YYMH | SGGST | GYSYG | IGRWL | QS | SIPIT | GASVKVSCKASGYT | SVGDRVTITCRAS |
| | (SEQ | SYA | RYYYY | A | (SEQ | F | FTSYYMHWVRQAPG | QSIGRWLAWYQQK |
| | ID | (SEQ | GMDVW | (SEQ | ID | (SEQ | QGLEWMGIINPSGG | PGKAPKLLIYDAS |
| | NO: | ID | (SEQ | ID | NO: | ID | STSYAQKFQGRVTM | NLQSGVPSRFSGS |
| | 215) | NO: | ID | NO: | 222) | NO: | TRDTSTSTVYMELS | GSGTDFTLTISSL |
| | | 69) | NO: | 221) | | 198) | SLRSEDTAVYYCAR | QPEDFATYYCQQS |
| | | | 220) | | | | DTGYSYGRYYYYGM | YSIPITFGQGTKV |
| | | | | | | | DVWGQGTLVTVSS | EIK (SEQ ID |
| | | | | | | | (SEQ ID NO: | NO: 503) |
| | | | | | | | 502) | |
| 42. | YTLTD | GIINP | CAREE | RASQG | AASSL | CQQSY | QVQLVQSGAEVKKP | DIQMTQSPSSLSA |
| | YYMH | SGGST | YSSSS | ISSWL | QS | STPLT | GASVKVSCKASGYT | SVGDRVTITCRAS |
| | (SEQ | SYA | GYFDY | A | (SEQ | F | LTDYYMHWVRQAPG | QGISSWLAWYQQK |
| | ID | (SEQ | W | (SEQ | ID | (SEQ | QGLEWMGIINPSGG | PGKAPKLLIYAAS |
| | NO: | ID | (SEQ | ID | NO: | ID | STSYAQKFQGRVTM | SLQSGVPSRFSGS |
| | 224) | NO: | ID | NO: | 65) | NO: | TRDTSTSTVYMELS | GSGTDFTLTISSL |
| | | 69) | NO: | 226) | | 173) | SLRSEDTAVYYCAR | QPEDFATYYCQQS |
| | | | 225) | | | | EEYSSSSGYFDYWG | YSTPLTFGQGTKV |
| | | | | | | | QGTLVTVSS (SEQ | EIK (SEQ ID |
| | | | | | | | ID NO: 504) | NO: 505) |
| 43. | YTFTS | GWMHP | CARDT | RASQS | AASSL | CQQSY | QVQLVQSGAEVKKP | DIQMTQSPSSLSA |
| | YGIS | KSGDT | PYYYY | ISSWL | QS | SVPIT | GASVKVSCKASGYT | SVGDRVTITCRAS |
| | (SEQ | GLT | GMDVW | A | (SEQ | F | FTSYGISWVRQAPG | QSISSWLAWYQQK |
| | ID | (SEQ | (SEQ | (SEQ | ID | (SEQ | QGLEWMGWMHPKSG | PGKAPKLLIYAAS |
| | NO: | ID | ID | ID | NO: | ID | DTGLTQKFQGRVTM | SLQSGVPSRFSGS |
| | 228) | NO: | NO: | NO: | 65) | NO: | TRDTSTSTVYMELS | GSGTDFTLTISSL |
| | | 229) | 230) | 196) | | 231) | SLRSEDTAVYYCAR | QPEDFATYYCQQS |
| | | | | | | | DTPYYYYGMDVWGQ | YSVPITFGQGTKV |
| | | | | | | | GTTVTVSS (SEQ | EIK (SEQ ID |
| | | | | | | | ID NO: 506) | NO: 507) |
| 44. | FTFSS | SAISG | CAKER | QASQD | SSLQS | QQTYS | EVQLLESGGGLVQP | DIQMTQSPSSLSA |
| | YAMS | SGGST | FIDYG | ISNYL | (SEQ | GWT | GGSLRLSCAASGFT | SVGDRVTITCQAS |
| | (SEQ | YYA | MDVW | N | ID | (SEQ | FSSYAMSWVRQAPG | QDISNYLNWYQQK |
| | ID | (SEQ | (SEQ | (SEQ | NO: | ID | KGLEWVSAISGSGG | PGKAPKLLIYAAS |
| | NO: | ID | ID | ID | 362) | NO: | STYYADSVKGRFTI | SLQSGVPSRFSGS |
| | 473) | NO: | NO: | NO: | | 509 | SRDNSKNTLYLQMN | GSGTDFTLTISSL |
| | | 103) | 508) | 138) | | | SLRAEDTAVYYCAK | QPEDFATYYCQQT |
| | | | | | | | ERFIDYGMDVWGQG | YSGWTFGPGTKVD |
| | | | | | | | TTVTVSS (SEQ | IK (SEQ ID |
| | | | | | | | ID NO: 510) | NO: 511) |
| 45. | FTFGD | SYISG | CARDV | RASQS | AASSL | CQQSY | EVQLVESGGGLVKP | DIQMTQSPSSLSA |
| | YAMS | DIGYT | AATGN | ISSYL | QS | STPLT | GGSLRLSCAASGFT | SVGDRVTITCRAS |
| | (SEQ | NYA | WYFDL | N | (SEQ | F | FGDYAMSWVRQAPG | QSISSYLNWYQQK |
| | ID | (SEQ | W | (SEQ | ID | (SEQ | KGLEWVSYISGDIG | PGKAPKLLIYAAS |
| | NO: | ID | (SEQ | ID | NO: | ID | YTNYAAPVKGRFTI | SLQSGVPSRFSGS |
| | 233) | NO: | ID | NO: | 65) | NO: | SRDDSKNTLYLQMN | GSGTDFTLTISSL |
| | | 234) | NO: | 172) | | 173) | SLKTEDTAVYYCAR | QPEDFATYYCQQS |
| | | | 235) | | | | DVAATGNWYFDLWG | YSTPLTFGGGTKV |
| | | | | | | | RGTLVTVSS (SEQ | EIK (SEQ ID |
| | | | | | | | ID NO: 512) | NO: 459) |
| 46. | FSFSS | SFITS | CARDR | RASQS | GASTR | CQQYG | EVQLLESGGGLVQP | EIVMTQSPATLSV |
| | YTMN | SSRTI | RGDYG | VRNYL | AT | SSPLT | GGSLRLSCAASGFS | SPGERATLSCRAS |
| | (SEQ | YYA | DSWYF | A | (SEQ | F | FSSYTMNWVRQAPG | QSVRNYLAWYQQK |
| | ID | (SEQ | DLW | (SEQ | ID | (SEQ | KGLEWVSFITSSSR | PGQAPRLLIYGAS |
| | NO: | ID | (SEQ | ID | NO: | ID | TIYYADSVKGRFTI | TRATGIPARFSGS |
| | 237) | NO: | ID | NO: | 241) | NO: | SRDNSKNTLYLQMN | GSGTEFTLTISSL |
| | | 238) | NO: | 240) | | 242) | SLRAEDTAVYYCAR | QSEDFAVYYCQQY |
| | | | 239) | | | | DRRGDYGDSWYFDL | GSSPLTFGGGTKV |
| | | | | | | | WGRGTLVTVSS | EIK (SEQ ID |
| | | | | | | | (SEQ ID NO: | NO: 514) |
| | | | | | | | 513) | |
| 47. | YTFTG | GIINP | CARDT | RASQS | DASNL | CQQSY | QVQLVQSGAEVKKP | DIQMTQSPSSLSA |
| | HYMH | SGGST | GYSYG | IGRWL | QS | SIPIT | GASVKVSCKASGYT | SVGDRVTITCRAS |
| | (SEQ | SYA | RYYYY | A | (SEQ | F | FSKHFVHWVRQAPG | QSISSWLAWYQQK |
| | ID | (SEQ | GMDVW | (SEQ | ID | (SEQ | QGLEWMGWMNPNSG | PGKAPKLLIYAAS |
| | NO: | ID | (SEQ | ID | NO: | ID | NSGYAQKFQGRVTM | TLQSGVPSRFSGS |
| | 244) | NO: | ID | NO: | 222) | NO: | TRDTSTSTVYMELS | GSGTDFTLTISSL |
| | | 69) | NO: | 221) | | 198) | SLRSEDTAVYYCAR | QPEDFATYYCQQS |
| | | | 220) | | | | GEGGYYYYGMDVWG | YSTPWTFGQGTKV |
| | | | | | | | QGTLVTVSS (SEQ | EIK (SEQ ID |
| | | | | | | | ID NO: 515) | NO: 516) |
| 48. | YTFSK | GWMNP | CARGE | RASQS | AASTL | CQQSY | EVQLLESGGGLVQP | DIQMTQSPSSLSA |
| | HFVH | NSGNS | GGYYY | ISSWL | QS | STPWT | GGSLRLSCAASGFT | SVGDRVTITCRAS |
| | (SEQ | GYA | YGMDV | A | (SEQ | F | FGSYSMSWVRQAPG | QPLSNWLAWYQQK |
| | ID | (SEQ | W | (SEQ | ID | (SEQ | KGLEWVSAIGTGGG | PGKAPKLLIYAAS |
| | NO: | ID | (SEQ | ID | NO: | ID | TYYADSVKGRFTIS | SLQSGVPSRFSGS |
| | 246) | NO: | ID | NO: | 113) | NO: | RDNSKNTLYLQMNS | GSGTDFTLTISSL |
| | | 247) | NO: | 196) | | 114) | LRAEDTAVYYCAKG | QPEDFATYYCQQA |
| | | | 248) | | | | TPYYYYYGMDVWGQ | ISFPLTFGGGTKV |
| | | | | | | | GTMVTVSS (SEQ | EIK (SEQ ID |
| | | | | | | | ID NO: 517) | NO: 518) |
| 49. | FTFGS | SAIGT | CAKGT | RASQP | AASSL | CQQAI | QVQLVQSGAEVKKP | DIQMTQSPSSLSA |
| | YSMS | GGGTY | PYYYY | LSNWL | QS | SFPLT | GASVKVSCKASGYT | SVGDRVTITCQSS |
| | SEQ | YA | YGMDV | A | (SEQ | F | FTSYYMHWVRQAPG | EDISSSLNWYQQK |
| | ID | (SEQ | W | (SEQ | ID | (SEQ | QGLEWMGWMNPNSG | PGKAPKLLIYAAS |
| | NO: | ID | SEQ | ID | NO: | ID | NTGYAQKFQGRVTM | SLQIGVPSRFSGS |
| | 250) | NO: | ID | NO: | 65) | NO: | TRDTSTSTVYMELS | GSGTDFTLTISSL |
| | | 251) | NO: | 253) | | 254) | SLRSEDTAVYYCAR | QPEDFATYYCQQT |
| | | | 252) | | | | DLGYYDSSGYFGAF | YSTPYTFGQGTKV |
| | | | | | | | DIWGQGTTVTVSS | EIK (SEQ ID |
| | | | | | | | (SEQ ID NO: | NO: 520) |
| | | | | | | | 519) | |
| 50. | YTFTS | GWMNP | CARDL | QSSED | AASSL | CQQTY | QVQLVQSGAEVKKP | DIQMTQSPSSLSA |
| | YYMH | NSGNT | GYYDS | ISSSL | QI | STPYT | GASVKVSCKASGYT | SVGDRVTITCRAS |
| | (SEQ | GYA | SGYFG | N | (SEQ | F | FTSYGISWVRQAPG | QGIGNWLAWYQQK |
| | ID | (SEQ | AFDIW | (SEQ | ID | (SEQ | QGLEWMGIINPRGG | PGKAPKLLIYAAS |
| | NO: | ID | (SEQ | ID | NO: | ID | STIFAQKFQGRVTM | NLETGVPSRFSGS |
| | 215) | NO: | ID | NO: | 258) | NO: | TRDTSTSTVYMELS | GSGTDFTLTISSL |
| | | 205) | NO: | 257) | | 259) | SLRSEDTAVYYCAR | QPEDFATYYCQQI |
| | | | 256) | | | | GTRSSGWYGWFDPW | HSYPLTFGGGTKV |
| | | | | | | | GQGTLVTVSS | EIK (SEQ ID |
| | | | | | | | (SEQ ID NO: | NO: 522 |
| | | | | | | | 521) | |
| 51. | YTFTS | GIINP | CARGT | RASQG | AASNL | CQQIH | EVQLVESGGGLVKP | DIVMTQSPLSLPV |
| | YGIS | RGGST | RSSGW | IGNWL | ET | SYPLT | GGSLRLSCAASGFI | TPGEPASISCRSS |
| | (SEQ | IFA | YGWFD | A | (SEQ | F | FQDSAIHWVRQAPG | QSLLHSNGYNYLD |
| | ID | (SEQ | PW | (SEQ | ID | (SEQ | KGLEWVSAIGTGGG | WYLQKPGQSPQLL |
| | NO: | ID | (SEQ | ID | NO: | ID | TYYAAPVKGRFTIS | IYDASNLETGVPD |
| | 228) | NO: | ID | NO: | 264) | NO: | RDDSKNTLYLQMNS | RFSGSGSGTDFTL |
| | | 261) | NO: | 263) | | 265) | LKTEDTAVYYCARS | KISRVEAEDVGVY |
| | | | 262) | | | | YCSGGSCSLGSWGQ | YCMQALQTPLTFG |
| | | | | | | | GTLVTVSS (SEQ | QGTKVEIK (SEQ |
| | | | | | | | ID NO: 523) | ID NO: 524) |
| 52. | FTFDD | SYISS | CAREI | RASQS | AASSL | CQQSY | EVQLLESGGGLVQP | DIQMTQSPSSLSA |
| | YGMS | SSSYI | AAAGF | ISSYL | QS | STPLT | GGSLRLSCAASGFT | SVGDRVTITCRAS |
| | (SEQ | YYA | YGMDV | N | (SEQ | F | FDDYGMSWVRQAPG | QSISSYLNWYQQK |
| | ID | (SEQ | W | (SEQ | ID | (SEQ | KGLEWVSYISSSSS | PGKAPKLLIYAAS |
| | NO: | ID | (SEQ | ID | NO: | ID | YIYYADSVKGRFTI | SLQSGVPSRFSGS |
| | 267) | NO: | ID | NO: | 65) | NO: | SRDNSKNTLYLQMN | GSGTDFTLTISSL |
| | | 268) | NO: | 172) | | 173) | SLRAEDTAVYYCAR | QPEDFATYYCQQS |
| | | | 269) | | | | EIAAAGFYGMDVWG | YSTPLTFGGGTKV |
| | | | | | | | QGTTVTVSS (SEQ | EIK (SEQ ID |
| | | | | | | | ID NO: 525) | NO: 459 |
| 53. | YTFTS | GWMNP | CAREG | RASQG | SSLQS | QQSYS | QVQLVQSGAEVKKP | DIQMTQSPSSLSA |
| | YYMH | NSGNT | LGYCT | ISSWL | (SEQ | TPYT | GASVKVSCKASGYT | SVGDRVTITCRAS |
| | (SEQ | GYA | NGVCW | A | ID | (SEQ | FTSYYMHWVRQAPG | QGISSWLAWYQQK |
| | ID | (SEQ | NYYGM | (SEQ | NO: | ID | QGLEWMGWMNPNSG | PGKAPKLLIYGAS |
| | NO: | ID | DVW | ID | 362) | NO: | NTGYAQKFQGRVTM | SLQSGVPSRFSGS |
| | 215) | NO: | (SEQ | NO: | | 527) | TRDTSTSTVYMELS | GSGTDFTLTISSL |
| | | 205) | ID | 226) | | | SLRSEDTAVYYCAR | QPEDFATYYCQQS |
| | | | NO: | | | | EGLGYCTNGVCWNY | YSTPYTFGQGTKV |
| | | | 526) | | | | YGMDVWGQGTLVTV | EIK (SEQ ID |
| | | | | | | | SS (SEQ ID NO: | NO: 529 |
| | | | | | | | 528) | |
| 54. | GTLSR | GGIIP | CARDR | RASQS | GASTR | CQQYG | QVQLVQSGAEVKKP | EIVMTQSPATLSV |
| | YGVS | IFGTT | VYYDS | VSSSY | AT | SSPIT | GSSVKVSCKASGGT | SPGERATLSCRAS |
| | (SEQ | NYA | SGYPT | LA | (SEQ | F | LSRYGVSWVRQAPG | QSVSSSYLAWYQQ |
| | ID | (SEQ | WYFDL | (SEQ | ID | (SEQ | QGLEWMGGIIPIFG | KPGQAPRLLIYGA |
| | NO: | ID | W | ID | NO: | ID | TTNYAQKFQGRVTI | STRATGIPARFSG |
| | 271) | NO: | (SEQ | NO: | 241) | NO: | TADESTSTAYMELS | SGSGTEFTLTISS |
| | | 272) | ID | 274) | | 275) | SLRSEDTAVYYCAR | LQSEDFAVYYCQQ |
| | | | NO: | | | | DRVYYDSSGYPTWY | YGSSPITFGQGTK |
| | | | 273) | | | | FDLWGRGTLVTVSS | VEIK (SEQ ID |
| | | | | | | | (SEQ ID NO: | NO: 531) |
| | | | | | | | 530) | |
| 55. | FTFDD | SGISG | CARDA | QASQD | KASTL | CQQAN | EVQLLESGGGLVQP | DIQMTQSPSSLSA |
| | FAMH | NGDSR | SYGGN | IRNYL | ES | SFPLT | GGSLRLSCAASGFT | SVGDRVTITCQAS |
| | (SEQ | YYA | YGMDV | N | (SEQ | F | FDDFAMHWVRQAPG | QDIRNYLNWYQQK |
| | ID | (SEQ | W | (SEQ | ID | (SEQ | KGLEWVSGISGNGD | PGKAPKLLIYKAS |
| | NO: | ID | (SEQ | ID | NO: | ID | SRYYADSVKGRFTI | TLESGVPSRFSGS |
| | 277) | NO: | ID | NO: | 139) | NO: | SRDNSKNTLYLQMN | GSGTDFTLTISSL |
| | | 278) | NO: | 280) | | 167) | SLRAEDTAVYYCAR | QPEDFATYYCQQA |
| | | | 279) | | | | DASYGGNYGMDVWG | NSFPLTFGPGTKV |
| | | | | | | | QGTTVTVSS (SEQ | DIK (SEQ ID |
| | | | | | | | ID NO: 532) | NO: 533) |
| 56. | FTFSS | SAIGT | CAREW | RASQS | GASNL | CQQSY | EVQLVESGGGLVKP | DIQMTQSPSSLSA |
| | YWMS | GGGTY | LVPYY | ISRWL | QS | STPWT | GGSLRLSCAASGFT | SVGDRVTITCRAS |
| | (SEQ | YA | GMDVW | A | (SEQ | F | FSSYWMSWVRQAPG | QSISRWLAWYQQK |
| | ID | (SEQ | (SEQ | (SEQ | ID | (SEQ | KGLEWVSAIGTGGG | PGKAPKLLIYGAS |
| | NO: | ID | ID | ID | NO: | ID | TYYAAPVKGRFTIS | NLQSGVPSRFSGS |
| | 169) | NO: | NO: | NO: | 284) | NO: | RDDSKNTLYLQMNS | GSGTDFTLTISSL |
| | | 251) | 282) | 283) | | 114) | LKTEDTAVYYCARE | QPEDFATYYCQQS |
| | | | | | | | WLVPYYGMDVWGQG | YSTPWTFGQGTKV |
| | | | | | | | TTVTVSS (SEQ | EIK (SEQ ID |
| | | | | | | | ID NO: 534) | NO: 535) |
| 57. | FSVSS | AGISY | CARSR | KSSQS | WASTR | CHQYY | EVQLLESGGGLVQP | DIVMTQSPDSLAV |
| | NYMS | DGSSK | GIAAR | VLYSS | QS | GHPPT | GGSLRLSCAASGES | SLGERATINCKSS |
| | (SEQ | PYA | PLQHW | NNKNY | (SEQ | F | VSSNYMSWVRQAPG | QSVLYSSNNKNYL |
| | ID | (SEQ | (SEQ | LA | ID | (SEQ | KGLEWVAGISYDGS | AWYQQKPGQPPKL |
| | NO: | ID | ID | (SEQ | NO: | ID | SKPYADSVKGRFTI | LIYWASTRQSGVP |
| | 286) | NO: | NO: | ID | 290) | NO: | SRDNSKNTLYLQMN | DRFSGSGSGTDFT |
| | | 287) | 288) | NO: | | 291) | SLRAEDTAVYYCAR | LTISSLQAEDVAV |
| | | | | 289) | | | SRGIAARPLQHWGQ | YYCHQYYGHPPTF |
| | | | | | | | GTLVTVSS (SEQ | GGGTKVEIK |
| | | | | | | | ID NO: 536) | (SEQ ID NO: |
| | | | | | | | | 537) |
| 58. | FSVSS | AGISY | CARSR | KSSQS | QASTR | CHQYY | EVQLLESGGGLVQP | DIVMTQSPDSLAV |
| | NYMS | DGSSK | GIAAR | VLYSS | QS | GHPPT | GGSLRLSCAASGES | SLGERATINCKSS |
| | (SEQ | PYA | PLQHW | NNKNY | (SEQ | F | VSSNYMSWVRQAPG | QSVLYSSNNKNYL |
| | ID | (SEQ | (SEQ | LA | ID | (SEQ | KGLEWVAGISYDGS | AWYQQKPGQPPKL |
| | NO: | ID | ID | (SEQ | NO: | ID | SKPYADSVKGRFTI | LIYQASTRQSGVP |
| | 286) | NO: | NO: | ID | 293) | NO: | SRDNSKNTLYLQMN | DRFSGSGSGTDFT |
| | | 287) | 288) | NO: | | 291) | SLRAEDTAVYYCAR | LTISSLQAEDVAV |
| | | | | 289) | | | SRGIAARPLQHWGQ | YYCHQYYGHPPTF |
| | | | | | | | GTLVTVSS (SEQ | GGGTKVEIK |
| | | | | | | | ID NO: 536) | (SEQ ID NO: |
| | | | | | | | | 538) |
| 59. | FSFSD | SAISG | CARDG | RASQG | DASNL | CQQSY | EVQLLESGGGLVQP | DIQMTQSPSSLSA |
| | YGMH | SGGST | GWQPA | ISNNL | ET | STPLT | GGSLRLSCAASGFS | SVGDRVTITCRAS |
| | (SEQ | YYA | AILDY | N | (SEQ | F | FSDYGMHWVRQAPG | QGISNNLNWYQQK |
| | ID | (SEQ | W | (SEQ | ID | (SEQ | KGLEWVSAISGSGG | PGKAPKLLIYDAS |
| | NO: | ID | (SEQ | ID | NO: | ID | STYYADSVKGRFTI | NLETGVPSRFSGS |
| | 295) | NO: | ID | NO: | 159) | NO: | SRDNSKNTLYLQMN | GSGTDFTLTISSL |
| | | 103) | NO: | 105) | | 173) | SLRAEDTAVYYCAR | QPEDFATYYCQQS |
| | | | 296) | | | | DGGWQPAAILDYWG | YSTPLTFGGGTKV |
| | | | | | | | QGTLVTVSS (SEQ | EIK (SEQ ID |
| | | | | | | | ID NO: 539) | NO: 540) |
| 60. | FTFSD | SVIYG | CARDP | RASQG | DASNL | CQQSY | EVQLLESGGGLVQP | DIQMTQSPSSLSA |
| | HGMH | GESTY | AVAGG | ISNYL | ET | STCYT | GGSLRLSCAASGET | SVGDRVTITCRAS |
| | (SEQ | YA | GIFDY | A | (SEQ | F | FSDHGMHWVRQAPG | QGISNYLAWYQQK |
| | ID | (SEQ | W | (SEQ | ID | (SEQ | KGLEWVSVIYGGES | PGKAPKLLIYDAS |
| | NO: | ID | (SEQ | ID | NO: | ID | TYYADSVKGRFTIS | NLETGVPSRESGS |
| | 298) | NO: | ID | NO: | 159) | NO: | RDNSKNTLYLQMNS | GSGTDFTLTISSL |
| | | 299) | NO: | 218) | | 301) | LRAEDTAVYYCARD | QPEDFATYYCQQS |
| | | | 300) | | | | PAVAGGGIFDYWGQ | YSTCYTFGQGTKL |
| | | | | | | | GTLVTVSS (SEQ | EIK (SEQ ID |
| | | | | | | | ID NO: 541) | NO: 542) |
| 61. | DTFTG | GWINP | CARSG | RASQT | DASTL | CQQYS | QVQLVQSGAEVKKP | DIQMTQSPSSLSA |
| | YYIH | NSGGT | LWLGS | ISIWL | QS | SYPLT | GASVKVSCKASGDT | SVGDRVTITCRAS |
| | (SEQ | NYA | YYGMD | A | (SEQ | F | FTGYYIHWVRQAPG | QTISIWLAWYQQK |
| | ID | (SEQ | VW | (SEQ | ID | (SEQ | QGLEWMGWINPNSG | PGKAPKLLIYDAS |
| | NO: | ID | (SEQ | ID | NO: | ID | GTNYAQKFQGRVTM | TLQSGVPSRESGS |
| | 303) | NO: | ID | NO: | 307) | NO: | TRDTSTSTVYMELS | GSGTDFTLTISSL |
| | | 304) | NO: | 306) | | 308) | SLRSEDTAVYYCAR | QPEDFATYYCQQY |
| | | | 305) | | | | SGLWLGSYYGMDVW | SSYPLTFGQGTKV |
| | | | | | | | GQGTLVTVSS | EIK (SEQ ID |
| | | | | | | | (SEQ ID NO: | NO: 544) |
| | | | | | | | 543) | |
| 62. | YTFTS | GWINP | CARSP | RASHF | AASTL | CQQSY | QVQLVQSGAEVKKP | DIQMTQSPSSLSA |
| | YDIN | NSGT | YYYYG | ISRWV | QS | SGISF | GASVKVSCKASGYT | SVGDRVTITCRAS |
| | (SEQ | GYA | MDVW | A | (SEQ | (SEQ | FTSYDINWVRQAPG | HFISRWVAWYQQK |
| | ID | (SEQ | (SEQ | (SEQ | ID | ID | QGLEWMGWINPNSG | PGKAPKLLIYAAS |
| | NO: | ID | ID | ID | NO: | NO: | TTGYAQKFQGRVTM | TLQSGVPSRFSGS |
| | 310) | NO: | NO: | NO: | 113) | 314) | TRDTSTSTVYMELS | GSGTDFTLTISSL |
| | | 311) | 312) | 313) | | | SLRSEDTAVYYCAR | QPEDFATYYCQQS |
| | | | | | | | SPYYYYGMDVWGQG | YSGISFGPGTKVD |
| | | | | | | | TTVTVSS (SEQ | IK (SEQ ID |
| | | | | | | | ID NO: 545) | NO: 546) |
| 63. | FTFNN | SRINS | CARGA | RASQS | ATSSR | CQQYY | EVQLLESGGGLVQP | EIVMTQSPATLSV |
| | YGMN | DGSST | YYYYY | VSGSY | AS | SGLTF | GGSLRLSCAASGFT | SPGERATLSCRAS |
| | (SEQ | SYA | MDVW | LA | (SEQ | (SEQ | FNNYGMNWVRQAPG | QSVSGSYLAWYQQ |
| | ID | (SEQ | (SEQ | (SEQ | ID | ID | KGLEWVSRINSDGS | KPGQAPRLLIYAT |
| | NO: | ID | ID | ID | NO: | NO: | STSYADSVKGRFTI | SSRASGIPARFSG |
| | 316) | NO: | NO: | NO: | 320) | 321) | SRDNSKNTLYLQMN | SGSGTEFTLTISS |
| | | 317) | 318) | 319) | | | SLRAEDTAVYYCAR | LQSEDFAVYYCQQ |
| | | | | | | | GAYYYYYMDVWGQG | YYSGLTFGQGTKV |
| | | | | | | | TLVTVSS (SEQ | EIK (SEQ ID |
| | | | | | | | ID NO: 547) | NO: 548) |
| 64. | FTFSN | AHIWN | CARDR | RASQD | DASSL | CQQAT | EVQLLESGGGLVQP | DIQMTQSPSSLSA |
| | SDMN | DGSQK | TDPGY | IRNYL | ET | SLPLT | GGSLRLSCAASGFT | SVGDRVTITCRAS |
| | (SEQ | YYA | SSAMD | G | (SEQ | F | FSNSDMNWVRQAPG | QDIRNYLGWYQQK |
| | ID | (SEQ | VW | (SEQ | ID | (SEQ | KGLEWVAHIWNDGS | PGKAPKLLIYDAS |
| | NO: | ID | (SEQ | ID | NO: | ID | QKYYADSVKGRFTI | SLETGVPSRFSGS |
| | 323) | NO: | ID | NO: | 327) | NO: | SRDNSKNTLYLQMN | GSGTDFTLTISSL |
| | | 324) | NO: | 326 | | 328) | SLRAEDTAVYYCAR | QPEDFATYYCQQA |
| | | | 325) | | | | DRTDPGYSSAMDVW | TSLPLTFGGGTKV |
| | | | | | | | GQGTTVTVSS | EIK (SEQ ID |
| | | | | | | | (SEQ ID NO: | NO: 550) |
| | | | | | | | 549) | |
| 65. | YTFTS | GWMNP | CAKDS | RASQD | QASSL | CQQSY | QVQLVQSGAEVKKP | DIQMTQSPSSLSA |
| | YDIN | NSGNT | DYSNL | ITNDL | ES | TIPLT | GASVKVSCKASGYT | SVGDRVTITCRAS |
| | (SEQ | GYA | LWDYW | G | (SEQ | F | FTSYDINWVRQAPG | QDITNDLGWYQQK |
| | ID | (SEQ | (SEQ | (SEQ | ID | (SEQ | QGLEWMGWMNPNSG | PGKAPKLLIYQAS |
| | NO: | ID | ID | ID | NO: | ID | NTGYAQKFQGRVTM | SLESGVPSRFSGS |
| | 310) | NO: | NO: | NO: | 332) | NO: | TRDTSTSTVYMELS | GSGTDFTLTISSL |
| | | 205) | 330) | 331) | | 333) | SLRSEDTAVYYCAK | QPEDFATYYCQQS |
| | | | | | | | DSDYSNLLWDYWGQ | YTIPLTFGQGTKV |
| | | | | | | | GTLVTVSS (SEQ | EIK (SEQ ID |
| | | | | | | | ID NO: 551) | NO: 552) |
| 66. | YTFTG | GIINP | CARDG | RASQG | SNLET | QQYYS | QVQLVQSGAEVKKP | DIQMTQSPSSLSA |
| | HYMH | SGGST | AWFGE | ISNWL | (SEQ | FPLYT | GASVKVSCKASGYT | SVGDRVTITCRAS |
| | (SEQ | SYA | EYYYG | A | ID | (SEQ | FTGHYMHWVRQAPG | QGISNWLAWYQQK |
| | ID | (SEQ | MDVW | (SEQ | NO: | ID | QGLEWMGIINPSGG | PGKAPKLLIYDAS |
| | NO: | ID | (SEQ | ID | 491) | NO: | STSYAQKFQGRVTM | NLETGVPSRFSGS |
| | 244) | NO: | ID | NO: | | 555) | TRDTSTSTVYMELS | GSGTDFTLTISSL |
| | | 69) | NO: | 554) | | | SLRSEDTAVYYCAR | QPEDFATYYCQQY |
| | | | 553) | | | | DGAWFGEEYYYGMD | YSFPLYTFGQGTK |
| | | | | | | | VWGQGTTVTVSS | VEIK (SEQ ID |
| | | | | | | | (SEQ ID NO: | NO: 557) |
| | | | | | | | 556) | |
| 67. | YTFTG | GMIYP | CAMTG | RASQG | STLQS | QQSYS | QVQLVQSGAEVKKP | DIQMTQSPSSLSA |
| | YYMH | RDGST | WGYGM | INNYL | (SEQ | APPT | GASVKVSCKASGYT | SVGDRVTITCRAS |
| | (SEQ | SYA | DVW | A | ID | (SEQ | FTGYYMHWVRQAPG | QGINNYLAWYQQK |
| | ID | (SEQ | (SEQ | (SEQ | NO: | ID | QGLEWMGMIYPRDG | PGKAPKLLIYDAS |
| | NO: | ID | ID | ID | 420) | NO: | STSYAQKFQGRVTM | TLQSGVPSRFSGS |
| | 128) | NO: | NO: | NO: | | 561) | TRDTSTSTVYMELS | GSGTDFTLTISSL |
| | | 558) | 559) | 560) | | | SLRSEDTAVYYCAM | QPEDFATYYCQQS |
| | | | | | | | TGWGYGMDVWGKGT | YSAPPTFGQGTKL |
| | | | | | | | TVTVSS (SEQ ID | EIK (SEQ ID |
| | | | | | | | NO: 562) | NO: 563) |
| 68. | FTFGD | AVVSY | CAKDI | RASQN | DASNL | CQQAN | EVQLLESGGGLVQP | DIQMTQSPSSLSA |
| | YAMS | DGTNK | CSSTS | INNYV | ET | SFPPT | GGSLRLSCAASGFT | SVGDRVTITCRAS |
| | (SEQ | YYA | CYFDL | N | (SEQ | F | FGDYAMSWVRQAPG | QNINNYVNWYQQK |
| | ID | (SEQ | W | (SEQ | ID | (SEQ | KGLEWVAVVSYDGT | PGKAPKLLIYDAS |
| | NO: | ID | (SEQ | ID | NO: | ID | NKYYADSVKGRFTI | NLETGVPSRFSGS |
| | 233) | NO: | ID | NO: | 159) | NO: | SRDNSKNTLYLQMN | GSGTDFTLTISSL |
| | | 335) | NO: | 337) | | 338) | SLRAEDTAVYYCAK | QPEDFATYYCQQA |
| | | | 336) | | | | DICSSTSCYFDLWG | NSFPPTFGQGTRL |
| | | | | | | | RGTLVTVSS (SEQ | EIK (SEQ ID |
| | | | | | | | ID NO: 564) | NO: 565) |
| 69. | YTFTS | GIIDP | CAREE | RASQG | ATSSL | CQQTY | QVQLVQSGAEVKKP | DIQMTQSPSSLSA |
| | YYMH | SGGST | WSSGG | ISSYL | QT | SIPIT | GASVKVSCKASGYT | SVGDRVTITCRAS |
| | (SEQ | SYA | VGYFD | A | (SEQ | F | FTSYYMHWVRQAPG | QGISSYLAWYQQK |
| | ID | (SEQ | YW | (SEQ | ID | (SEQ | QGLEWMGIIDPSGG | PGKAPKLLIYATS |
| | NO: | ID | (SEQ | ID | NO: | ID | STSYAQKFQGRVTM | SLQTGVPSRFSGS |
| | 215) | NO: | ID | NO: | 343) | NO: | TRDTSTSTVYMELS | GSGTDFTLTISSL |
| | | 340) | NO: | 342) | | 344) | SLRSEDTAVYYCAR | QPEDFATYYCQQT |
| | | | 341) | | | | EEWSSGGVGYFDYW | YSIPITFGQGTRL |
| | | | | | | | GQGTLVTVSS | EIK (SEQ ID |
| | | | | | | | (SEQ ID NO: | NO: 567) |
| | | | | | | | 566) | |
| 70. | YPFTD | GWIKP | CARDR | RASQS | SSLQS | QQSYD | QVQLVQSGAEVKKP | DIQMTQSPSSLSA |
| | YYMH | NSGDT | FVGKP | ISVWL | (SEQ | TPYT | GASVKVSCKASGYP | SVGDRVTITCRAS |
| | (SEQ | EYA | DYYYY | A | ID | (SEQ | FTDYYMHWVRQAPG | QSISVWLAWYQQK |
| | ID | (SEQ | GMDVW | (SEQ | NO: | ID | QGLEWMGWIKPNSG | PGKAPKLLIYAAS |
| | NO: | ID | (SEQ | ID | 362) | NO: | DTEYAQKFQGRVTM | SLQSGVPSRFSGS |
| | 568) | NO: | ID | NO: | | 572) | TRDTSTSTVYMELS | GSGTDFTLTISSL |
| | | 569) | NO: | 571) | | | SLRSEDTAVYYCAR | QPEDFATYYCQQS |
| | | | 570) | | | | DRFVGKPDYYYYGM | YDTPYTFGQGTKL |
| | | | | | | | DVWGQGTMVTVSS | EIK (SEQ ID |
| | | | | | | | (SEQ ID NO: | NO: 574) |
| | | | | | | | 573) | |
| 71. | YTFTS | GIINP | CARDS | RASQG | AASSL | CQQSY | QVQLVQSGAEVKKP | DIQMTQSPSSLSA |
| | YYMH | SGGST | VAGTG | ISNYF | QG | SLPYT | GASVKVSCKASGYT | SVGDRVTITCRAS |
| | (SEQ | SYA | GRYYG | A | (SEQ | F | FTSYYMHWVRQAPG | QGISNYFAWYQQK |
| | ID | (SEQ | MDVW | (SEQ | ID | (SEQ | QGLEWMGIINPSGG | PGKAPKLLIYAAS |
| | NO: | ID | (SEQ | ID | NO: | ID | STSYAQKFQGRVTM | SLQGGVPSRFSGS |
| | 215) | NO: | ID | NO: | 352) | NO: | TRDTSTSTVYMELS | GSGTDFTLTISSL |
| | | 69) | NO: | 351) | | 353) | SLRSEDTAVYYCAR | QPEDFATYYCQQS |
| | | | 350) | | | | DSVAGTGGRYYGMD | YSLPYTFGQGTKL |
| | | | | | | | VWGQGTLVTVSS | EIK (SEQ ID |
| | | | | | | | (SEQ ID NO: | NO: 576) |
| | | | | | | | 575) | |
| 72. | YTFTS | GVINP | CASGA | RASQS | SYLAT | QQSYS | QVQLVQSGAEVKKP | DIQMTQSPSSLSA |
| | YYMH | IGGTT | PSYYY | ISSYL | (SEQ | TPLT | GASVKVSCKASGYT | SVGDRVTITCRAS |
| | (SEQ | TYA | YGMDV | N | ID | (SEQ | FTSYYMHWVRQAPG | QSISSYLNWYQQK |
| | ID | (SEQ | W | (SEQ | NO: | ID | QGLEWMGVINPIGG | PGKAPKLLIYGTS |
| | NO: | ID | (SEQ | ID | 579) | NO: | TTTYAQKFQGRVTM | YLATGVPSRFSGS |
| | 215) | NO: | ID | NO: | | 429) | TRDTSTSTVYMELS | GSGTDFTLTISSL |
| | | 577) | NO: | 172) | | | SLRSEDTAVYYCAS | QPEDFATYYCQQS |
| | | | 578) | | | | GAPSYYYYGMDVWG | YSTPLTFGQGTKV |
| | | | | | | | QGTLVTVSS (SEQ | EIK (SEQ ID |
| | | | | | | | ID NO: 580) | NO: 581) |
| 73. | YTFTS | GRINP | CARAG | QASQD | TALRT | QQSYS | QVQLVQSGAEVKKP | DIQMTQSPSSLSA |
| | NYVH | HSGDT | QLWSD | IRNYL | (SEQ | HPLT | GASVKVSCKASGYT | SVGDRVTITCQAS |
| | (SEQ | SYA | WYFDL | N | ID | (SEQ | FTSNYVHWVRQAPG | QDIRNYLNWYQQK |
| | ID | (SEQ | W | (SEQ | NO: | ID | QGLEWMGRINPHSG | PGKAPKLLIYAAT |
| | NO: | ID | (SEQ | ID | 585) | NO: | DTSYAQKFQGRVTM | ALRTGVPSRFSGS |
| | 582) | NO: | ID | NO: | | 586) | TRDTSTSTVYMELS | GSGTDFTLTISSL |
| | | 583) | NO: | 280) | | | SLRSEDTAVYYCAR | QPEDFATYYCQQS |
| | | | 584) | | | | AGQLWSDWYFDLWG | YSHPLTFGQGTKV |
| | | | | | | | RGTLVTVSS (SEQ | EIK (SEQ ID |
| | | | | | | | ID NO: 587) | NO: 588) |
| 74. | YTFTG | GIINP | CTTAD | RASQG | AASSL | CQQYY | QVQLVQSGAEVKKP | DIQMTQSPSSLSA |
| | YYMH | SGGNT | YYYYM | ISNYL | QS | SNADF | GASVKVSCKASGYT | SVGDRVTITCRAS |
| | (SEQ | KYA | DVW | A | (SEQ | (SEQ | FTGYYMHWVRQAPG | QGISNYLAWYQQK |
| | ID | (SEQ | (SEQ | (SEQ | ID | ID | QGLEWMGIINPSGG | PGKAPKLLIYAAS |
| | NO: | ID | ID | ID | NO: | NO: | NTKYAQKFQGRVTM | SLQSGVPSRFSGS |
| | 128) | NO: | NO: | NO: | 65) | 357) | TRDTSTSTVYMELS | GSGTDFTLTISSL |
| | | 355) | 356) | 218) | | | SLRSEDTAVYYCTT | QPEDFATYYCQQY |
| | | | | | | | ADYYYYMDVWGKGT | YSNADFGQGTKVE |
| | | | | | | | TVTVSS (SEQ ID | IK (SEQ ID |
| | | | | | | | NO: 589) | NO: 590) |
| 75. | FTFSD | SYISG | CARDR | RASQS | SSLQS | QQYKS | EVQLLESGGGLVQP | DIQMTQSPSSLSA |
| | FWMH | DSGYT | PYYYY | VSRSL | (SEQ | YPVT | GGSLRLSCAASGFT | SVGDRVTITCRAS |
| | (SEQ | NYA | MDVW | A | ID | (SEQ | FSDFWMHWVRQAPG | QSVSRSLAWYQQK |
| | ID | (SEQ | (SEQ | (SEQ | NO: | ID | KGLEWISYISGDSG | PGKAPKLLIYAAS |
| | NO: | ID | ID | ID | 362) | NO: | YTNYADSVKGRFTI | SLQSGVPSRFSGS |
| | 359) | NO: | NO: | NO: | | 363) | SRDNSKNTLYLQMN | GSGTDFTLTISSL |
| | | 170) | 360) | 361) | | | SLRAEDTAVYYCAR | QPEDFATYYCQQY |
| | | | | | | | DRPYYYYMDVWGKG | KSYPVTFGQGTKV |
| | | | | | | | TTVTVSS (SEQ | EIK (SEQ ID |
| | | | | | | | ID NO: 591) | NO: 592) |
| 76. | FTFDD | SDISG | CAKDV | QASQD | SYLQS | QQAHN | EVQLLESGGGLVQP | DIQMTQSPSSLSA |
| | YTMH | SGGST | VVAGT | ISNYL | (SEQ | YPIT | GGSLRLSCAASGFT | SVGDRVTITCQAS |
| | (SEQ | YYA | PLHFD | N | ID | (SEQ | FDDYTMHWVRQAPG | QDISNYLNWYQQK |
| | ID | (SEQ | YW | (SEQ | NO: | ID | KGLEWVSDISGSGG | PGKAPKLLIYAAS |
| | NO: | ID | (SEQ | ID | 368) | NO: | STYYADSVKGRFTI | YLQSGVPSRFSGS |
| | 365) | NO: | ID | NO: | | 369) | SRDNSKNTLYLQMN | GSGTDFTLTISSL |
| | | 366) | NO: | 138) | | | SLRAEDTAVYYCAK | QPEDFATYYCQQA |
| | | | 367) | | | | DVVVAGTPLHFDYW | HNYPITFGQGTRL |
| | | | | | | | GQGTLVTVSS | EIK (SEQ ID |
| | | | | | | | (SEQ ID NO: | NO: 594) |
| | | | | | | | 593) | |
| 77. | FTFSN | ASISS | CAREV | RASQS | SSLQS | QQANA | EVQLLESGGGLVQP | DIQMTQSPSSLSA |
| | AWMS | TSAYI | VGATT | ISTWL | (SEQ | FPPT | GGSLRLSCAASEFT | SVGDRVTITCRAS |
| | (SEQ | DYA | FDYW | A | ID | (SEQ | FSNAWMSWVRQAPG | QSISTWLAWYQQK |
| | ID | (SEQ | (SEQ | (SEQ | NO: | ID | KGLEWVASISSTSA | PGKAPKLLIYAAS |
| | NO: | ID | ID | ID | 362) | NO: | YIDYADSVKGRFTI | SLQSGVPSRFSGS |
| | 183) | NO: | NO: | NO: | | 374) | SRDNSKNTLYLQMN | GSGTDFTLTISSL |
| | | 371) | 372) | 373) | | | SLRAEDTAVYYCAR | QPEDFATYYCQQA |
| | | | | | | | EVVGATTFDYWGQG | NAFPPTFGQGTRL |
| | | | | | | | TLVTVSS (SEQ | EIK (SEQ ID |
| | | | | | | | ID NO: 595) | NO: 596) |
| 78. | GTFSS | GWMEP | CAKGG | KSSQS | STRES | QQYYS | QVQLVQSGAEVKKP | DIVMTQSPDSLAV |
| | YAIS | HTGNT | FSWFD | VLYSS | (SEQ | TPPT | GSSVKVSCKASGGT | SLGERATINCKSS |
| | (SEQ | RYA | PW | NNKNY | ID | (SEQ | FSSYAI SWVRQAPG | QSVLYSSNNKNYL |
| | ID | (SEQ | (SEQ | LA | NO: | ID | QGLEWMGWMEPHTG | AWYQQKPGQPPKL |
| | NO: | ID | ID | (SEQ | 378) | NO: | NTRYAQKFQGRVTI | LIYWASTRESGVP |
| | 77) | NO: | NO: | ID | | 379) | TADESTSTAYMELS | DRFSGSGSGTDFT |
| | | 376) | 377) | NO: | | | SLRSEDTAVYYCAK | LTISSLQAEDVAV |
| | | | | 289) | | | GGFSWFDPWGQGTL | YYCQQYYSTPPTF |
| | | | | | | | VTVSS (SEQ ID | GQGTRLEIK |
| | | | | | | | NO: 597) | (SEQ ID NO: |
| | | | | | | | | 598) |
| 79. | FTFDD | ASITS | CARER | RASQG | STRAT | QQYYT | EVQLLESGGGLVKP | EIVMTQSPATLSV |
| | YAMH | SSAFI | VDWNS | ISNSY | (SEQ | YPPT | GGSLRLSCAASGFT | SPGERATLSCRAS |
| | (SEQ | DYA | YFDLW | LA | ID | (SEQ | FDDYAMHWVRQAPG | QGISNSYLAWYQQ |
| | ID | (SEQ | (SEQ | (SEQ | NO: | ID | KGLEWVASITSSSA | KPGQAPRLLIYGA |
| | NO: | ID | ID | ID | 384) | NO: | FIDYAASVKGRFTI | STRATGIPARFSG |
| | 135) | NO: | NO: | NO: | | 385) | SRDDSKNTLYLQMN | SGSGTEFTLTISS |
| | | 381) | 382) | 383) | | | SLKTEDTAVYYCAR | LQSEDFAVYYCQQ |
| | | | | | | | ERVDWNSYFDLWGR | YYTYPPTFGPGTK |
| | | | | | | | GTLVTVSS (SEQ | VDIK (SEQ ID |
| | | | | | | | ID NO: 599) | NO: 600) |
| 80. | FTFDD | SAISG | CAKDL | QASQD | SNLEA | QQSYS | EVQLLESGGGLVQP | DIQMTQSPSSLSA |
| | YAMH | SGGST | GVVVP | ISNHL | (SEQ | TPLT | GGSLRLSCAASGFT | SVGDRVTITCQAS |
| | (SEQ | YYA | AALDY | N | ID | (SEQ | FDDYAMHWVRQAPG | QDISNHLNWYQQK |
| | ID | (SEQ | W | (SEQ | NO: | ID | KGLEWVSAISGSGG | PGKAPKLLIYDAS |
| | NO: | ID | (SEQ | ID | 603) | NO: | STYYADSVKGRFTI | NLEAGVPSRFSGS |
| | 135) | NO: | ID | NO: | | 429) | SRDNSKNTLYLQMN | GSGTDFTLTISSL |
| | | 103) | NO: | 602) | | | SLRAEDTAVYYCAK | QPEDFATYYCQQS |
| | | | 601) | | | | DLGVVVPAALDYWG | YSTPLTFGGGTKV |
| | | | | | | | QGTTVTVSS (SEQ | EIK (SEQ ID |
| | | | | | | | ID NO: 604) | NO: 605) |
| 81. | FAFSS | AGTSG | CARET | RASQG | ANLEG | QQSDI | EVQLLESGGGLVKP | DIQMTQSPSSLSA |
| | HWMH | SGESR | YYYYY | ISNYL | (SEQ | FPPT | GGSLRLSCAASGFA | SVGDRVTITCRAS |
| | (SEQ | DYA | MDVW | A | ID | (SEQ | FSSHWMHWVRQAPG | QGISNYLAWYQQK |
| | ID | (SEQ | (SEQ | (SEQ | NO: | ID | KGLEWVAGTSGSGE | PGKAPKLLIYDAA |
| | NO: | ID | ID | ID | 390) | NO: | SRDYADFVKGRFTI | NLEGGVPSRFSGS |
| | 387) | NO: | NO: | NO: | | 391) | SRDDSKNTLYLQMN | GSGTDFTLTISSL |
| | | 388) | 389) | 218) | | | SLKTEDTAVYYCAR | QPEDFATYYCQQS |
| | | | | | | | ETYYYYYMDVWGKG | DIFPPTFGQGTKV |
| | | | | | | | TTVTVSS (SEQ | EIK (SEQ ID |
| | | | | | | | ID NO: 606) | NO: 607) |
| 82. | YTFTR | GWINV | CARES | RASQS | SSLQS | QQSNS | QVQLVQSGAEVKKP | DIQMTQSPSSLSA |
| | HWIH | KTGGA | SGWYG | ISNYL | (SEQ | FPLT | GASVKVSCKASGYT | SVGDRATITCRAS |
| | (SEQ | GYA | TDVW | A | ID | (SEQ | FTRHWIHWVRQAPG | QSISNYLAWYQQK |
| | ID | (SEQ | (SEQ | (SEQ | NO: | ID | QGLEWMGWINVKTG | PGKAPKLLIYAAS |
| | NO: | ID | ID | ID | 362) | NO: | GAGYAQKFQGRVTM | SLQSGVPSRFSGS |
| | 393) | NO: | NO: | NO: | | 397) | TRDTSTSTVYMELS | GSGTDFTLTISSL |
| | | 394) | 395) | 396) | | | SLRSEDTAVYYCAR | QPEDFATYYCQQS |
| | | | | | | | ESSGWYGTDVWGQG | NSFPLTFGGGTKV |
| | | | | | | | TTVTVSS (SEQ | EIK (SEQ ID |
| | | | | | | | ID NO: 608) | NO: 609) |
| 83. | FTFSS | AAISY | CAREN | QASQD | NLRS | QQANS | EVQLLESGGGLVQP | DIQMTQSPSSLSA |
| | YWMH | DGKYK | KQWLA | ISNFV | (SEQ | FPVT | GGSLRLSCAASGFT | SVGDRVTITCQAS |
| | (SEQ | DYE | SFDYW | N | ID | (SEQ | FSSYWMHWVRQAPG | QDISNFVNWYQQK |
| | ID | (SEQ | (SEQ | (SEQ | NO: | ID | KGLEWVAAISYDGK | PGKAPKLLIYAAN |
| | NO: | ID | ID | ID | 402) | NO: | YKDYEDSVKGRFTI | LRSGVPSRFSGSG |
| | 83) | NO: | NO: | NO: | | 403) | SRDNSKNTLYLQMN | SGTDFTLTISSLQ |
| | | 399) | 400) | 401) | | | SLRAEDTAVYYCAR | PEDFATYYCQQAN |
| | | | | | | | ENKQWLASFDYWGQ | SFPVTFGPGTKVD |
| | | | | | | | GTLVTVSS (SEQ | IK (SEQ ID |
| | | | | | | | ID NO: 610) | NO: 611) |
| 84. | GTFSS | GWISA | CASRV | QASEH | SSLQS | QQTDS | QVQLVQSGAEVKKP | DIQMTQSPSSLSA |
| | SAIS | YNGYT | HSGGS | IYNYL | (SEQ | IPIT | GASVKVSCKASGGT | SVGDRVTITCQAS |
| | (SEQ | NYA | YPDDY | N | ID | (SEQ | FSSSAISWVRQAPG | EHIYNYLNWYQQK |
| | ID | (SEQ | W | (SEQ | NO: | ID | QGLEWMGWISAYNG | PGKAPKLLIYAAS |
| | NO: | ID | (SEQ | ID | 362) | NO: | YTNYAQKFQGRVTM | SLQSGVPSRESGS |
| | 612) | NO: | ID | NO: | | 616) | TRDTSTSTVYMELS | GSGTDFTLTISSL |
| | | 613) | NO: | 615) | | | SLRSEDTAVYYCAS | QPEDFATYYCQQT |
| | | | 614) | | | | RVHSGGSYPDDYWG | DSIPITFGQGTKV |
| | | | | | | | QGTLVTVSS (SEQ | EIK (SEQ ID |
| | | | | | | | ID NO: 617) | NO: 618) |

[0347] In some embodiments, the antibody comprises the CDRs of Clone ID: 6, Clone ID: 75, or Clone ID: 79 of Table 7.

[0348] The IgG and scFv formats illustrated herein are simply non-limiting examples. The CDRs provided herein can be placed in different formats, including different VH and VL/VK formats and still be able to bind to MAdCAM.

[0349] Although the CDRs are illustrated in the tables provided herein, there are other ways to annotate or identify CDRs. For example, in some embodiments, the HCDR2 can have an extra amino acid at the N-terminus. For example, for the HCDR2 of Clone 6 the table indicates that it has a sequence of: SRLINSYGTSTTYA (SEQ ID NO: 91) However, in some embodiments, the HCDR2 has a sequence of VSRINSYGTSTTYA (SEQ ID NO: 629), which is shown with an extra residue, a valine, at the N-terminus of the HCDR2. The valine is clearly illustrated in VH peptide of the tables provided herein. Therefore, in some embodiments, the HCDR2 comprises one additional amino acid immediately to the N-terminus of the HCDR2 listed in the table. The residue would be the residue that is immediately to the N-terminus of the HCDR2 found in the VH sequence provided for in the table in the same row. One of skill in the art with this information could immediately envisage the HCDR2 peptide sequence that has the additional amino acid residue immediately to the N-terminus of the HCDR2 listed in the table. These embodiments are sufficiently described and do not require application to list each of these different annotations and one of skill in the art with the guidance and description provided herein could write them out individually without any undue experimentation.

[0350] Similarly, the HCDR3 can exclude the cysteine residue. Each of the HCDR3 polypeptides provided for in Tables 6 and 7 begins with a cysteine residue. In some embodiments, the HCDR3 does not include the cysteine. Furthermore, in some embodiments, the HCDR3 does not have the last C-terminal residue illustrated in Table 6 and 7 provided for herein. Therefore, in some embodiments, the HCDR3 does not have the cysteine and/or the last C-terminal residue illustrated in the tables. One of skill in the art with this information could immediately envisage the HCDR3 peptide sequence that does not have the cysteine and/or the last C-terminal residue illustrated in the tables. These embodiments are sufficiently described and do not require application to list each of these different annotations and one of skill in the art with the guidance and description provided herein could write them out individually without any undue experimentation.

[0351] In some embodiments, the light chain CDR2 can have one or two extra amino acid residues at the N-terminus. These additional residues would be those that are immediately to the N-terminus of the light chain CDR2 (LCDR2) present in the VL/VK chain provided for herein, in the same row as the CDRs that are listed. For example, the LCDR2 of Clone 6 is provided as GASSLQS (SEQ ID NO: 87), but in some embodiments could be IYGASSLQS (SEQ ID NO: 630) or YGASSLQS (SEQ ID NO: 631). One of skill in the art with this information could immediately envisage the LCDR2 peptide sequence that has one or two extra amino acid residues at the N-terminus of the LCDR2 sequence provided for herein. These embodiments are sufficiently described and do not require application to list each of these different annotations and one of skill in the art with the guidance and description provided herein could write them out individually without any undue experimentation.

[0352] There are also alternative systems for annotating CDRs, any of which can be used. For example, CDRs can be chosen based on the Kabat sytem, the IMGT system, or the Chothia system. Other proprietary systems can also be used, which may be based on the predicted 3-dimensional structure of the protein. Accordingly, in some embodiments, the CDRs of Clone ID: 6, Clone ID: 75, or Clone ID: 79 of Table 7 can also be characterized as shown in Table 8. These alternative CDRs can be substituted for these clone referenced in Table 7 or the equivalent clone numbering in Table 6, i.e., Clone 6, Clone 59, and Clone 63.

TABLE 8
Alterative CDRs for Certain Clones

| Clone No. | Annotation | | | | | | |
|---|---|---|---|---|---|---|---|
| (Table 7) | System | LCDR1 | LCDR2 | LCDR3 | HCDR1 | HCDR2 | HCDR3 |
| 6 | Proprietary | RASQIIG | SSLQS | QQSYRLP | FTFNNYA | SRINSYG | CAREGPVA |
| | | TNLA | (SEQ ID | FT (SEQ | FH (SEQ | TSTTYA | GYWYFDLW |
| | | (SEQ ID | NO: | ID NO: | ID NO: | (SEQ ID | (SEQ ID |
| | | NO: 93) | 362) | 632) | 90) | NO: 91) | NO: 92) |
| | Other | RASQIIG | GASSLQS | COQSYRL | FTENNYA | SRINSYG | CAREGPVA |
| | Annotation | TNLA | (SEQ ID | PFTF | FH (SEQ | TSTTYA | GYWYFDLW |
| | | (SEQ ID | NO: 87) | (SEQ ID | ID NO: | (SEQ ID | (SEQ ID |
| | | NO: 93) | | NO: 94) | 90 | NO: 91) | NO: 92) |
| | Kabat | RASQIIG | GASSLQS | QQSYRLP | NYAFH | RINSYGT | EGPVAGYW |
| | | TNLA | (SEQ ID | FT (SEQ | (SEQ ID | STTYADS | YFDL |
| | | (SEQ ID | NO: 87) | ID NO: | NO: | VKG | (SEQ ID |
| | | NO: 93) | | 632) | 633) | (SEQ ID | NO: 635) |
| | | | | | | NO: | |
| | | | | | | 634) | |
| | IMGT | QIIGTN | GAS | QQSYRLP | GFTFNNY | INSYGTS | AREGPVAG |
| | | (SEQ ID | | FT (SEQ | A (SEQ | T (SEQ | YWYFDL |
| | | NO: | | ID NO: | ID NO: | ID NO: | (SEQ ID |
| | | 636) | | 632) | 637) | 638) | NO: 639) |
| | CHOTHIA | RASQIIG | GASSLQS | QQSYRLP | GFTENNY | NSYGTS | EGPVAGYW |
| | | TNLA | (SEQ ID | FT (SEQ | (SEQ ID | (SEQ ID | YFDL |
| | | (SEQ ID | NO: 87) | ID NO: | NO: | NO: | (SEQ ID |
| | | NO: 93) | | 632) | 640) | 641) | NO: 635) |
| 75 | Proprietary | RASQSVS | SSLQS | QQYKSYP | FTFSDFW | SYISGDS | CARDRPYY |
| | | RSLA | (SEQ ID | VT (SEQ | MH (SEQ | GYTNYA | YYMDVW |
| | | (SEQ ID | NO: | ID NO: | ID NO: | (SEQ ID | (SEQ ID |
| | | NO: | 362) | 363) | 359) | NO: | NO: 360) |
| | | 361) | | | | 170) | |
| | Other | RASQSVS | AASSLQS | COQYKSY | FTFSDFW | SYISGDS | CARDRPYY |
| | Annotation | RSLA | (SEQ ID | PVTF | MH (SEQ | GYTNYA | YYMDVW |
| | | (SEQ ID | NO: 65) | (SEQ ID | ID NO: | (SEQ ID | (SEQ ID |
| | | NO: | | NO: | 359) | NO: | NO: 360) |
| | | 361) | | 642) | | 170) | |
| | Kabat | RASQSVS | AASSLQS | QQYKSYP | DFWMH | YISGDSG | DRPYYYYM |
| | | RSLA | (SEQ ID | VT (SEQ | (SEQ ID | YTNYADS | DV (SEQ |
| | | (SEQ ID | NO: 65) | ID NO: | NO: | VKG | ID NO: |
| | | NO: | | 363) | 643) | (SEQ ID | 645) |
| | | 361) | | | | NO: | |
| | | | | | | 644) | |
| | IMGT | QSVSRS | AAS | QQYKSYP | GFTFSDE | ISGDSGY | ARDRPYYY |
| | | (SEQ ID | | VT (SEQ | W (SEQ | T (SEQ | YMDV |
| | | NO: | | ID NO: | ID NO: | ID NO: | (SEQ ID |
| | | 646) | | 363) | 647) | 648) | NO: 649) |
| | CHOTHIA | RASQSVS | AASSLQS | QQYKSYP | GFTFSDE | SGDSGY | DRPYYYYM |
| | | RSLA | (SEQ ID | VT (SEQ | (SEQ ID | (SEQ ID | DV (SEQ |
| | | (SEQ ID | NO: 65) | ID NO: | NO: | NO: | ID NO: |
| | | NO: | | 363) | 650) | 651) | 645) |
| | | 361) | | | | | |
| 79 | Proprietary | RASQGIS | STRAT | QQYYTYP | FTFDDYA | ASITSSS | CARERVDW |
| | | NSYLA | (SEQ ID | PT (SEQ | MH (SEQ | AFIDYA | NSYFDLW |
| | | (SEQ ID | NO: | ID NO: | ID NO: | (SEQ ID | (SEQ ID |
| | | NO: | 384) | 385) | 135) | NO: | NO: 382) |
| | | 383) | | | | 381) | |
| | Other | RASQGIS | GASTRAT | COQYYTY | FTEDDYA | ASITSSS | CARERVDW |
| | Annotation | NSYLA | (SEQ ID | PPTF | MH (SEQ | AFIDYA | NSYFDLW |
| | | (SEQ ID | NO: | (SEQ ID | ID NO: | (SEQ ID | (SEQ ID |
| | | NO: | 241) | NO: | 135) | NO: | NO: 382) |
| | | 383) | | 652) | | 381) | |
| | Kabat | RASQGIS | GASTRAT | QQYYTYP | DYAMH | SITSSSA | ERVDWNSY |
| | | NSYLA | (SEQ ID | PT (SEQ | (SEQ ID | FIDYAAS | FDL (SEQ |
| | | (SEQ ID | NO: | ID NO: | NO: | VKG | ID NO: |
| | | NO: | 241) | 385) | 653) | (SEQ ID | 655) |
| | | 383) | | | | NO: | |
| | | | | | | 654) | |
| | IMGT | QGISNSY | GAS | QQYYTYP | GFTEDDY | ITSSSAF | ARERVDWN |
| | | (SEQ ID | | PT (SEQ | A (SEQ | I (SEQ | SYFDL |
| | | NO: | | ID NO: | ID NO: | ID NO: | (SEQ ID |
| | | 656) | | 385) | 657) | 658) | NO: 659) |
| | CHOTHIA | RASQGIS | GASTRAT | QQYYTYP | GFTEDDY | TSSSAF | ERVDWNSY |
| | | NSYLA | (SEQ ID | PT (SEQ | (SEQ ID | (SEQ ID | FDL (SEQ |
| | | (SEQ ID | NO: | ID NO: | NO: | NO: | ID NO: |
| | | NO: | 241) | 385) | 660) | 661) | 655) |
| | | 383) | | | | | |

[0353] In some embodiments, the MAdCAM antibody is selected from the following table

TABLE 9

| Clone | | | | | | | | |
|---|---|---|---|---|---|---|---|---|
| (Fab) | VH Seq | VK Seq | HCDR1 | HCDR2 | HCDR3 | LCDR1 | LCDR2 | LCDR3 |
| MIAB128 | EVQLLESGGG | DIQMTQSPS | FTFSD | SYISG | CARDR | RASQS | SSLQS | QQYKS |
| | LVQPGGSLRL | SLSASVGDR | FWMH | DSGYT | PNYYY | VSRSL | (SEQ | YPVT |
| | SCAASGFTFS | VTITCRASQ | (SEQ | NYA | MDVW | A | ID | (SEQ |
| | DFWMHWVRQA | SVSRSLAWY | ID | (SEQ | (SEQ | (SEQ | NO: | ID |
| | PGKGLEWISY | QQKPGKAPK | NO: | ID | ID | ID | 362) | NO: |
| | ISGDSGYTNY | LLIYAASSL | 359) | NO: | NO: | NO: | | 363) |
| | ADSVKGRFTI | QSGVPSRES | | 170) | 1399) | 361) | | |
| | SRDNSKNTLY | GSGSGTDFT | | | | | | |
| | LQMNSLRAED | LTISSLQPE | | | | | | |
| | TAVYYCARDR | DFATYYCQQ | | | | | | |
| | PNYYYMDVWG | YKSYPVTFG | | | | | | |
| | KGTTVTVSS | QGTKVEIK | | | | | | |
| | (SEQ ID | (SEQ ID | | | | | | |
| | NO: 1346) | NO: 592) | | | | | | |
| MIAB128A | EVQLLESGGG | DIQMTQSPS | FTFSD | SYISG | CARDR | RASQS | SSLQS | QQYKS |
| | LVQPGGSLRL | SLSASVGDR | FWMH | DSGYT | PQYYY | VSRSL | (SEQ | YPVT |
| | SCAASGFTFS | VTITCRASQ | (SEQ | NYA | MDVW | A | ID | (SEQ |
| | DFWMHWVRQA | SVSRSLAWY | ID | (SEQ | (SEQ | (SEQ | NO: | ID |
| | PGKGLEWISY | QQKPGKAPK | NO: | ID | ID | ID | 362) | NO: |
| | ISGDSGYTNY | LLIYAASSL | 359) | NO: | NO: | NO: | | 363) |
| | ADSVKGRFTI | QSGVPSRFS | | 170) | 1400) | 361) | | |
| | SRDNSKNTLY | GSGSGTDFT | | | | | | |
| | LQMNSLRAED | LTISSLQPE | | | | | | |
| | TAVYYCARDR | DFATYYCQQ | | | | | | |
| | PQYYYMDVWG | YKSYPVTFG | | | | | | |
| | KGTTVTVSS | QGTKVEIK | | | | | | |
| | (SEQ ID | (SEQ ID | | | | | | |
| | NO: 1348) | NO: 592) | | | | | | |
| MIAB129 | EVQLLESGGG | DIQMTQSPS | FTFSD | SYISG | CARDR | RASQS | SSLQS | QQYKS |
| | LVQPGGSLRL | SLSASVGDR | FWMH | DSGYT | PGYYY | VSRSL | (SEQ | YPVT |
| | SCAASGFTFS | VTITCRASQ | (SEQ | NYA | MDVW | A | ID | (SEQ |
| | DFWMHWVRQA | SVSRSLAWY | ID | (SEQ | (SEQ | (SEQ | NO: | ID |
| | PGKGLEWISY | QQKPGKAPK | NO: | ID | ID | ID | 362) | NO: |
| | ISGDSGYTNY | LLIYAASSL | 359) | NO: | NO: | NO: | | 363) |
| | ADSVKGRFTI | QSGVPSRFS | | 170) | 1401) | 361) | | |
| | SRDNSKNTLY | GSGSGTDFT | | | | | | |
| | LQMNSLRAED | LTISSLQPE | | | | | | |
| | TAVYYCARDR | DFATYYCQQ | | | | | | |
| | PGYYYMDVWG | YKSYPVTFG | | | | | | |
| | KGTTVTVSS | QGTKVEIK | | | | | | |
| | (SEQ ID | (SEQ ID | | | | | | |
| | NO: 1349) | NO: 592) | | | | | | |
| MIAB130 | EVQLLESGGG | DIQMTQSPS | FTFSD | SYISG | CARDR | RASQS | SSLQS | QQYKS |
| | LVQPGGSLRL | SLSASVGDR | FWMH | DSGYT | PYYYQ | VSRSL | (SEQ | YPVT |
| | SCAASGFTES | VTITCRASQ | (SEQ | NYA | MDVW | A | ID | (SEQ |
| | DFWMHWVRQA | SVSRSLAWY | ID | (SEQ | (SEQ | (SEQ | NO: | ID |
| | PGKGLEWISY | QQKPGKAPK | NO: | ID | ID | ID | 362) | NO: |
| | ISGDSGYTNY | LLIYAASSL | 359) | NO: | NO: | NO: | | 363) |
| | ADSVKGRFTI | QSGVPSRES | | 170) | 1402) | 361) | | |
| | SRDNSKNTLY | GSGSGTDFT | | | | | | |
| | LQMNSLRAED | LTISSLQPE | | | | | | |
| | TAVYYCARDR | DFATYYCQQ | | | | | | |
| | PYYYQMDVWG | YKSYPVTFG | | | | | | |
| | KGTTVTVSS | QGTKVEIK | | | | | | |
| | (SEQ ID | (SEQ ID | | | | | | |
| | NO: 1350) | NO: 592) | | | | | | |
| MIAB131 | EVQLLESGGG | DIQMTQSPS | FTFSD | SYISG | CARDR | RASQS | SSLQS | QQYKS |
| | LVQPGGSLRL | SLSASVGDR | FWMH | DSGYT | PYYYG | VSRSL | (SEQ | YPVT |
| | SCAASGFTFS | VTITCRASQ | (SEQ | NYA | MDVW | A | ID | (SEQ |
| | DFWMHWVRQA | SVSRSLAWY | ID | (SEQ | (SEQ | (SEQ | NO: | ID |
| | PGKGLEWISY | QQKPGKAPK | NO: | ID | ID | ID | 362) | NO: |
| | ISGDSGYTNY | LLIYAASSL | 359) | NO: | NO: | NO: | | 363) |
| | ADSVKGRFTI | QSGVPSRFS | | 170) | 1403) | 361) | | |
| | SRDNSKNTLY | GSGSGTDFT | | | | | | |
| | LQMNSLRAED | LTISSLQPE | | | | | | |
| | TAVYYCARDR | DFATYYCQQ | | | | | | |
| | PYYYGMDVWG | YKSYPVTFG | | | | | | |
| | KGTTVTVSS | QGTKVEIK | | | | | | |
| | (SEQ ID | (SEQ ID | | | | | | |
| | NO: 1351) | NO: 592) | | | | | | |
| MIAB132 | EVQLLESGGG | DIQMTQSPS | FTFSN | SYISG | CARDR | RASQS | SSLQS | QQYKS |
| | LVQPGGSLRL | SLSASVGDR | FWMH | DSGYT | PYYYY | VSRSL | (SEQ | YPVT |
| | SCAASGFTFS | VTITCRASQ | (SEQ | NYA | MDVW | A | ID | (SEQ |
| | NFWMHWVRQA | SVSRSLAWY | ID | (SEQ | (SEQ | (SEQ | NO: | ID |
| | PGKGLEWISY | QQKPGKAPK | NO: | ID | ID | ID | 362) | NO: |
| | ISGDSGYTNY | LLIYAASSL | 1404) | NO: | NO: | NO: | | 363) |
| | ADSVKGRFTI | QSGVPSRES | | 170) | 360) | 361) | | |
| | SRDNSKNTLY | GSGSGTDFT | | | | | | |
| | LQMNSLRAED | LTISSLQPE | | | | | | |
| | TAVYYCARDR | DFATYYCQQ | | | | | | |
| | PYYYYMDVWG | YKSYPVTFG | | | | | | |
| | KGTTVTVSS | QGTKVEIK | | | | | | |
| | (SEQ ID | (SEQ ID | | | | | | |
| | NO: 1352) | NO: 592) | | | | | | |
| MIAB133 | EVQLLESGGG | DIQMTQSPS | FTFSS | SYISG | CARDR | RASQS | SSLQS | QQYKS |
| | LVQPGGSLRL | SLSASVGDR | FWMH | DSGYT | PYYYY | VSRSL | (SEQ | YPVT |
| | SCAASGFTFS | VTITCRASQ | (SEQ | NYA | MDVW | A | ID | (SEQ |
| | SFWMHWVRQA | SVSRSLAWY | ID | (SEQ | (SEQ | (SEQ | NO: | ID |
| | PGKGLEWISY | QQKPGKAPK | NO: | ID | ID | ID | 362) | NO: |
| | ISGDSGYTNY | LLIYAASSL | 1405) | NO: | NO: | NO: | | 363) |
| | ADSVKGRFTI | QSGVPSRES | | 170) | 360) | 361) | | |
| | SRDNSKNTLY | GSGSGTDFT | | | | | | |
| | LQMNSLRAED | LTISSLQPE | | | | | | |
| | TAVYYCARDR | DFATYYCQQ | | | | | | |
| | PYYYYMDVWG | YKSYPVTFG | | | | | | |
| | KGTTVTVSS | QGTKVEIK | | | | | | |
| | (SEQ ID | (SEQ ID | | | | | | |
| | NO: 1353) | NO: 592) | | | | | | |
| MIAB134 | EVQLLESGGG | DIQMTQSPS | FTFSA | SYISG | CARDR | RASQS | SSLQS | QQYKS |
| | LVQPGGSLRL | SLSASVGDR | FWMH | DSGYT | PYYYY | VSRSL | (SEQ | YPVT |
| | SCAASGFTFS | VTITCRASQ | (SEQ | NYA | MDVW | A | ID | (SEQ |
| | AFWMHWVRQA | SVSRSLAWY | ID | (SEQ | (SEQ | (SEQ | NO: | ID |
| | PGKGLEWISY | QQKPGKAPK | NO: | ID | ID | ID | 362) | NO: |
| | ISGDSGYTNY | LLIYAASSL | 1406) | NO: | NO: | NO: | | 363) |
| | ADSVKGRFTI | QSGVPSRFS | | 170) | 360) | 361) | | |
| | SRDNSKNTLY | GSGSGTDFT | | | | | | |
| | LQMNSLRAED | LTISSLQPE | | | | | | |
| | TAVYYCARDR | DFATYYCQQ | | | | | | |
| | PYYYYMDVWG | YKSYPVTFG | | | | | | |
| | KGTTVTVSS | QGTKVEIK | | | | | | |
| | (SEQ ID | (SEQ ID | | | | | | |
| | NO: 1354) | NO: 592) | | | | | | |
| MIAB135 | EVQLLESGGG | DIQMTQSPS | FTFSD | SYISG | CARDR | RASQS | SSLQS | QQYKS |
| | LVQPGGSLRL | SLSASVGDR | FWMH | DSGYT | PYYYY | VSRSL | (SEQ | YPVT |
| | SCAASGFTFS | VTITCRASQ | (SEQ | NYA | MDVW | A | ID | (SEQ |
| | DFWMHWVRQA | SVSRSLAWY | ID | (SEQ | (SEQ | (SEQ | NO: | ID |
| | PGKGLEWISY | QQKPGKAPK | NO: | ID | ID | ID | 362) | NO: |
| | ISGDSGYTNY | LLIYAASSL | 359) | NO: | NO: | NO: | | 363) |
| | ADSVKGRFTI | QSGVPSRES | | 170) | 360) | 361) | | |
| | SRDNSNNTLY | GSGSGTDFT | | | | | | |
| | LQMNSLRAED | LTISSLQPE | | | | | | |
| | TAVYYCARDR | DFATYYCQQ | | | | | | |
| | PYYYYMDVWG | YKSYPVTFG | | | | | | |
| | KGTTVTVSS | QGTKVEIK | | | | | | |
| | (SEQ ID | (SEQ ID | | | | | | |
| | NO: 1355) | NO: 592) | | | | | | |
| MIAB136 | EVQLLESGGG | DIQMTQSPS | FTFSS | SYISG | CARDR | RASQS | SSLQS | QQYKS |
| | LVQPGGSLRL | SLSASVGDR | YAMS | DSGYT | PYYYY | VSRSL | (SEQ | YPVT |
| | SCAASGFTFS | VTITCRASQ | (SEQ | NYA | MDVW | A | ID | (SEQ |
| | SYAMSWVRQA | SVSRSLAWY | ID | (SEQ | (SEQ | (SEQ | NO: | ID |
| | PGKGLEWISY | QQKPGKAPK | NO: | ID | ID | ID | 362) | NO: |
| | ISGDSGYTNY | LLIYAASSL | 473) | NO: | NO: | NO: | | 363) |
| | ADSVKGRFTI | QSGVPSRES | | 170) | 360) | 361) | | |
| | SRDNSKNTLY | GSGSGTDFT | | | | | | |
| | LQMNSLRAED | LTISSLQPE | | | | | | |
| | TAVYYCARDR | DFATYYCQQ | | | | | | |
| | PYYYYMDVWG | YKSYPVTFG | | | | | | |
| | KGTTVTVSS | QGTKVEIK | | | | | | |
| | (SEQ ID | (SEQ ID | | | | | | |
| | NO: 1356) | NO: 592) | | | | | | |
| MIAB137 | EVQLLESGGG | DIQMTQSPS | FTFSD | SAISG | CARDR | RASQS | SSLQS | QQYKS |
| | LVQPGGSLRL | SLSASVGDR | FWMH | SGGST | PYYYY | VSRSL | (SEQ | YPVT |
| | SCAASGFTES | VTITCRASQ | (SEQ | YYA | MDVW | A | ID | (SEQ |
| | DFWMHWVRQA | SVSRSLAWY | ID | (SEQ | (SEQ | (SEQ | NO: | ID |
| | PGKGLEWVSA | QQKPGKAPK | NO: | ID | ID | ID | 362) | NO: |
| | ISGSGGSTYY | LLIYAASSL | 359) | NO: | NO: | NO: | | 363) |
| | ADSVKGRFTI | QSGVPSRES | | 103) | 360) | 361) | | |
| | SRDNSKNTLY | GSGSGTDFT | | | | | | |
| | LQMNSLRAED | LTISSLQPE | | | | | | |
| | TAVYYCARDR | DFATYYCQQ | | | | | | |
| | PYYYYMDVWG | YKSYPVTFG | | | | | | |
| | KGTTVTVSS | QGTKVEIK | | | | | | |
| | (SEQ ID | (SEQ ID | | | | | | |
| | NO: 1357) | NO: 592) | | | | | | |
| MIAB138 | EVQLLESGGG | DIQMTQSPS | FTFSS | SAISG | CARDR | RASOS | SSLQS | QQYKS |
| | LVQPGGSLRL | SLSASVGDR | YAMS | SGGST | PYYYY | VSRSL | (SEQ | YPVT |
| | SCAASGFTES | VTITCRASQ | (SEQ | YYA | MDVW | A | ID | (SEQ |
| | SYAMSWVRQA | SVSRSLAWY | ID | (SEQ | (SEQ | (SEQ | NO: | ID |
| | PGKGLEWVSA | QQKPGKAPK | NO: | ID | ID | ID | 362) | NO: |
| | ISGSGGSTYY | LLIYAASSL | 473) | NO: | NO: | NO: | | 363) |
| | ADSVKGRFTI | QSGVPSRFS | | 103) | 360) | 361) | | |
| | SRDNSKNTLY | GSGSGTDFT | | | | | | |
| | LQMNSLRAED | LTISSLQPE | | | | | | |
| | TAVYYCARDR | DFATYYCQQ | | | | | | |
| | PYYYYMDVWG | YKSYPVTFG | | | | | | |
| | KGTTVTVSS | QGTKVEIK | | | | | | |
| | (SEQ ID | (SEQ ID | | | | | | |
| | NO: 1358) | NO: 592) | | | | | | |
| MIAB139 | EVQLLESGGG | DIQMTQSPS | FTFSD | SYISG | CARDR | RASQS | SSLQS | QQSYS |
| | LVQPGGSLRL | SLSASVGDR | FWMH | DSGYT | PYYYY | ISSYL | (SEQ | TPRT |
| | SCAASGFTES | VTITCRASQ | (SEQ | NYA | MDVW | N | ID | (SEQ |
| | DFWMHWVRQA | SISSYLNWY | ID | (SEQ | (SEQ | (SEQ | NO: | ID |
| | PGKGLEWISY | QQKPGKAPK | NO: | ID | ID | ID | 362) | NO: |
| | ISGDSGYTNY | LLIYAASSL | 359) | NO: | NO: | NO: | | 1407) |
| | ADSVKGRFTI | QSGVPSRES | | 170) | 360) | 172) | | |
| | SRDNSKNTLY | GSGSGTDFT | | | | | | |
| | LQMNSLRAED | LTISSLQPE | | | | | | |
| | TAVYYCARDR | DEATYYCQQ | | | | | | |
| | PYYYYMDVWG | SYSTPRTFG | | | | | | |
| | KGTTVTVSS | QGTKVEIK | | | | | | |
| | (SEQ ID | (SEQ ID | | | | | | |
| | NO: 591) | NO: 1360) | | | | | | |
| MIAB140 | EVQLLESGGG | DIQMTQSPS | FTFSS | SAISG | CARDR | RASQS | SSLQS | QQSYS |
| | LVQPGGSLRL | SLSASVGDR | YAMS | SGGST | PYYYY | ISSYL | (SEQ | TPRT |
| | SCAASGFTES | VTITCRASQ | (SEQ | YYA | MDVW | N | ID | (SEQ |
| | SYAMSWVRQA | SISSYLNWY | ID | (SEQ | (SEQ | (SEQ | NO: | ID |
| | PGKGLEWVSA | QQKPGKAPK | NO: | ID | ID | ID | 362) | NO: |
| | ISGSGGSTYY | LLIYAASSL | 473) | NO: | NO: | NO: | | 1407) |
| | ADSVKGRFTI | QSGVPSRES | | 103) | 360) | 172) | | |
| | SRDNSKNTLY | GSGSGTDFT | | | | | | |
| | LQMNSLRAED | LTISSLQPE | | | | | | |
| | TAVYYCARDR | DFATYYCQQ | | | | | | |
| | PYYYYMDVWG | SYSTPRTFG | | | | | | |
| | KGTTVTVSS | QGTKVEIK | | | | | | |
| | (SEQ ID | (SEQ ID | | | | | | |
| | NO: 1358) | NO: 1360) | | | | | | |
| MIAB141 | EVQLLESGGG | DIQMTQSPS | FTFSD | SYISG | CARDR | RASQS | SSLQS | QQYKS |
| | LVQPGGSLRL | SLSASVGDR | FWMH | DSGYT | PYYYY | ISSYL | (SEQ | YPVT |
| | SCAASGFTFS | VTITCRASQ | (SEQ | NYA | MDVW | N | ID | (SEQ |
| | DFWMHWVRQA | SISSYLNWY | ID | (SEQ | (SEQ | (SEQ | NO: | ID |
| | PGKGLEWISY | QQKPGKAPK | NO: | ID | ID | ID | 362) | NO: |
| | ISGDSGYTNY | LLIYAASSL | 359) | NO: | NO: | NO: | | 363) |
| | ADSVKGRFTI | QSGVPSRFS | | 170) | 360) | 172) | | |
| | SRDNSKNTLY | GSGSGTDFT | | | | | | |
| | LQMNSLRAED | LTISSLQPE | | | | | | |
| | TAVYYCARDR | DFATYYCQQ | | | | | | |
| | PYYYYMDVWG | YKSYPVTFG | | | | | | |
| | KGTTVTVSS | QGTKVEIK | | | | | | |
| | (SEQ ID | (SEQ ID | | | | | | |
| | NO: 591) | NO: 1361) | | | | | | |
| MIAB142 | EVQLLESGGG | DIQMTQSPS | FTFSD | SYISG | CARDR | RASQS | SSLQS | QQSYS |
| | LVQPGGSLRL | SLSASVGDR | FWMH | DSGYT | PYYYY | VSRSL | (SEQ | TPRT |
| | SCAASGFTFS | VTITCRASQ | (SEQ | NYA | MDVW | A | ID | (SEQ |
| | DFWMHWVRQA | SVSRSLAWY | ID | (SEQ | (SEQ | (SEQ | NO: | ID |
| | PGKGLEWISY | QQKPGKAPK | NO: | ID | ID | ID | 362) | NO: |
| | ISGDSGYTNY | LLIYAASSL | 359) | NO: | NO: | NO: | | 1407) |
| | ADSVKGRFTI | QSGVPSRFS | | 170) | 360) | 361) | | |
| | SRDNSKNTLY | GSGSGTDFT | | | | | | |
| | LQMNSLRAED | LTISSLQPE | | | | | | |
| | TAVYYCARDR | DFATYYCOQ | | | | | | |
| | PYYYYMDVWG | SYSTPRTFG | | | | | | |
| | KGTTVTVSS | QGTKVEIK | | | | | | |
| | (SEQ ID | (SEQ ID | | | | | | |
| | NO: 591) | NO: 1362) | | | | | | |
| MIAB143 | EVQLLESGGG | DIQMTQSPS | FTFSD | SYISG | CARDR | RASQS | SSLQS | QQYKS |
| | LVQPGGSLRL | SLSASVGDR | FWMH | DSGYT | PYYYY | VSRSL | (SEQ | YPVT |
| | SCAASGFTES | VTITCRASQ | (SEQ | NYA | MDVW | A | ID | (SEQ |
| | DFWMHWVRQA | SVSRSLAWY | ID | (SEQ | (SEQ | (SEQ | NO: | ID |
| | PGKGLEWISY | QQKPGKAPK | NO: | ID | ID | ID | 362) | NO: |
| | ISGDSGYTNY | LLIYAASSL | 359) | NO: | NO: | NO: | | 363) |
| | ADSVKGRFTI | QSGVPSRFS | | 170) | 360) | 361) | | |
| | SRDNSKNTLY | GSGSGTDFT | | | | | | |
| | LQMNSLRAED | LTISSLQPE | | | | | | |
| | TAVYYCARDR | DFATYYCQQ | | | | | | |
| | PYYYYMDVWG | YKSYPVTFG | | | | | | |
| | KGTTVTVSS | QGTKVEIK | | | | | | |
| | (SEQ ID | (SEQ ID | | | | | | |
| | NO: 591) | NO: 592) | | | | | | |
| MIAB144 | EVQLLESGGG | DIQMTQSPS | FTFSD | SYISG | CARDR | RASQS | SSLQS | QQYKS |
| | LVQPGGSLRL | SLSASVGDR | FWMH | DSGYT | PYYYY | VSRSL | (SEQ | YPVT |
| | SCAASGFTFS | VTITCRASQ | (SEQ | NYA | MDVW | A | ID | (SEQ |
| | DFWMHWVRQA | SVSRSLAWY | ID | (SEQ | (SEQ | (SEQ | NO: | ID |
| | PGKGLEWISY | QQKPGKAPK | NO: | ID | ID | ID | 362) | NO: |
| | ISGDSGYTNY | LLIYAASSL | 359) | NO: | NO: | NO: | | 363) |
| | ADSVKGRFTI | QSGVPSRFS | | 170) | 360) | 361) | | |
| | SRDNSKNTLY | GSGSGTDFT | | | | | | |
| | LQMNSLRAED | LTISSLQPE | | | | | | |
| | TAVYYCARDR | DFATYYCOQ | | | | | | |
| | PYYYYMDVWG | YKSYPVTFG | | | | | | |
| | KGTTVTVSS | QGTKVEIK | | | | | | |
| | (SEQ ID | (SEQ ID | | | | | | |
| | NO: 591) | NO: 592) | | | | | | |
| MIAB145 | EVQLLESGGG | DIQMTQSPS | FTFSD | SYISG | CARDR | RASQS | SSLQS | QQYKS |
| | LVQPGGSLRL | SLSASVGDR | FWMH | DSGYT | PYYYY | ISRSL | (SEQ | YPVT |
| | SCAASGFTFS | VTITCRASQ | (SEQ | NYA | MDVW | A | ID | (SEQ |
| | DFWMHWVRQA | SISRSLAWY | ID | (SEQ | (SEQ | (SEQ | NO: | ID |
| | PGKGLEWISY | QQKPGKAPK | NO: | ID | ID | ID | 362) | NO: |
| | ISGDSGYTNY | LLIYAASSL | 359) | NO: | NO: | NO: | | 363) |
| | ADSVKGRFTI | QSGVPSRES | | 170) | 360) | 1408) | | |
| | SRDNSKNTLY | GSGSGTDET | | | | | | |
| | LQMNSLRAED | LTISSLQPE | | | | | | |
| | TAVYYCARDR | DFATYYCQQ | | | | | | |
| | PYYYYMDVWG | YKSYPVTFG | | | | | | |
| | KGTTVTVSS | QGTKVEIK | | | | | | |
| | (SEQ ID | (SEQ ID | | | | | | |
| | NO: 591) | NO: 1363) | | | | | | |
| MIAB146 | EVQLLESGGG | DIQMTQSPS | FTFSD | SYISG | CARDR | RASQS | SSLQS | QQYKS |
| | LVQPGGSLRL | SLSASVGDR | FWMH | DSGYT | PYYYY | VSSSL | (SEQ | YPVT |
| | SCAASGFTES | VTITCRASQ | (SEQ | NYA | MDVW | A | ID | (SEQ |
| | DFWMHWVRQA | SVSSSLAWY | ID | (SEQ | (SEQ | (SEQ | NO: | ID |
| | PGKGLEWISY | QQKPGKAPK | NO: | ID | ID | ID | 362) | NO: |
| | ISGDSGYTNY | LLIYAASSL | 359) | NO: | NO: | NO: | | 363) |
| | ADSVKGRFTI | QSGVPSRFS | | 170) | 360) | 1409) | | |
| | SRDNSKNTLY | GSGSGTDFT | | | | | | |
| | LQMNSLRAED | LTISSLQPE | | | | | | |
| | TAVYYCARDR | DFATYYCQQ | | | | | | |
| | PYYYYMDVWG | YKSYPVTFG | | | | | | |
| | KGTTVTVSS | QGTKVEIK | | | | | | |
| | (SEQ ID | (SEQ ID | | | | | | |
| | NO: 591) | NO: 1364) | | | | | | |
| MIAB147 | EVQLLESGGG | DIQMTQSPS | FTFSD | SYISG | CARDR | RASQS | SSLQS | QQYKS |
| | LVQPGGSLRL | SLSASVGDR | FWMH | DSGYT | PYYYY | VSRYL | (SEQ | YPVT |
| | SCAASGFTES | VTITCRASQ | (SEQ | NYA | MDVW | A | ID | (SEQ |
| | DFWMHWVRQA | SVSRYLAWY | ID | (SEQ | (SEQ | (SEQ | NO: | ID |
| | PGKGLEWISY | QQKPGKAPK | NO: | ID | ID | ID | 362) | NO: |
| | ISGDSGYTNY | LLIYAASSL | 359) | NO: | NO: | NO: | | 363) |
| | ADSVKGRFTI | QSGVPSRES | | 170) | 360) | 1410) | | |
| | SRDNSKNTLY | GSGSGTDFT | | | | | | |
| | LQMNSLRAED | LTISSLQPE | | | | | | |
| | TAVYYCARDR | DFATYYCQQ | | | | | | |
| | PYYYYMDVWG | YKSYPVTFG | | | | | | |
| | KGTTVTVSS | QGTKVEIK | | | | | | |
| | (SEQ ID | (SEQ ID | | | | | | |
| | NO: 591) | NO: 1365) | | | | | | |
| MIAB148 | EVQLLESGGG | DIQMTQSPS | FTFSD | SYISG | CARDR | RASQS | SSLQS | QQYKS |
| | LVQPGGSLRL | SLSASVGDR | FWMH | DSGYT | PYYYY | VSRSL | (SEQ | YPVT |
| | SCAASGFTES | VTITCRASQ | (SEQ | NYA | MDVW | N | ID | (SEQ |
| | DFWMHWVRQA | SVSRSLNWY | ID | (SEQ | (SEQ | (SEQ | NO: | ID |
| | PGKGLEWISY | QQKPGKAPK | NO: | ID | ID | ID | 362) | NO: |
| | ISGDSGYTNY | LLIYAASSL | 359) | NO: | NO: | NO: | | 363) |
| | ADSVKGRFTI | QSGVPSRFS | | 170) | 360) | 1411) | | |
| | SRDNSKNTLY | GSGSGTDFT | | | | | | |
| | LQMNSLRAED | LTISSLQPE | | | | | | |
| | TAVYYCARDR | DFATYYCQQ | | | | | | |
| | PYYYYMDVWG | YKSYPVTFG | | | | | | |
| | KGTTVTVSS | QGTKVEIK | | | | | | |
| | (SEQ ID | (SEQ ID | | | | | | |
| | NO: 591) | NO: 1366) | | | | | | |
| MIAB149 | EVQLLESGGG | DIQMTQSPS | FTFSD | SYISG | CARDR | RASQS | SSLQS | QQYKS |
| | LVQPGGSLRL | SLSASVGDR | FWMH | DSGYT | PYYYY | ISSSL | (SEQ | YPVT |
| | SCAASGFTFS | VTITCRASQ | (SEQ | NYA | MDVW | A | ID | (SEQ |
| | DFWMHWVRQA | SISSSLAWY | ID | (SEQ | (SEQ | (SEQ | NO: | ID |
| | PGKGLEWISY | QQKPGKAPK | NO: | ID | ID | ID | 362) | NO: |
| | ISGDSGYTNY | LLIYAASSL | 359) | NO: | NO: | NO: | | 363) |
| | ADSVKGRFTI | QSGVPSRFS | | 170) | 360) | 1412) | | |
| | SRDNSKNTLY | GSGSGTDFT | | | | | | |
| | LQMNSLRAED | LTISSLQPE | | | | | | |
| | TAVYYCARDR | DFATYYCQQ | | | | | | |
| | PYYYYMDVWG | YKSYPVTFG | | | | | | |
| | KGTTVTVSS | QGTKVEIK | | | | | | |
| | (SEQ ID | (SEQ ID | | | | | | |
| | NO: 591) | NO: 1367) | | | | | | |
| MIAB150 | EVQLLESGGG | DIQMTQSPS | FTFSD | SYISG | CARDR | RASQS | SSLQS | QQYKS |
| | LVQPGGSLRL | SLSASVGDR | FWMH | DSGYT | PYYYY | ISRYL | (SEQ | YPVT |
| | SCAASGFTES | VTITCRASQ | (SEQ | NYA | MDVW | A | ID | (SEQ |
| | DFWMHWVRQA | SISRYLAWY | ID | (SEQ | (SEQ | (SEQ | NO: | ID |
| | PGKGLEWISY | QQKPGKAPK | NO: | ID | ID | ID | 362) | NO: |
| | ISGDSGYTNY | LLIYAASSL | 359) | NO: | NO: | NO: | | 363) |
| | ADSVKGRFTI | QSGVPSRFS | | 170) | 360) | 1413) | | |
| | SRDNSKNTLY | GSGSGTDFT | | | | | | |
| | LQMNSLRAED | LTISSLQPE | | | | | | |
| | TAVYYCARDR | DFATYYCQQ | | | | | | |
| | PYYYYMDVWG | YKSYPVTFG | | | | | | |
| | KGTTVTVSS | QGTKVEIK | | | | | | |
| | (SEQ ID | (SEQ ID | | | | | | |
| | NO: 591) | NO: 1368) | | | | | | |
| MIAB151 | EVQLLESGGG | DIQMTQSPS | FTFSD | SYISG | CARDR | RASQS | SSLQS | QQYKS |
| | LVQPGGSLRL | SLSASVGDR | FWMH | DSGYT | PYYYY | ISRSL | (SEQ | YPVT |
| | SCAASGFTFS | VTITCRASQ | (SEQ | NYA | MDVW | N | ID | (SEQ |
| | DFWMHWVRQA | SISRSLNWY | ID | (SEQ | (SEQ | (SEQ | NO: | ID |
| | PGKGLEWISY | QQKPGKAPK | NO: | ID | ID | ID | 362) | NO: |
| | ISGDSGYTNY | LLIYAASSL | 359) | NO: | NO: | NO: | | 363) |
| | ADSVKGRFTI | QSGVPSRFS | | 170) | 360) | 1414) | | |
| | SRDNSKNTLY | GSGSGTDFT | | | | | | |
| | LQMNSLRAED | LTISSLQPE | | | | | | |
| | TAVYYCARDR | DFATYYCQQ | | | | | | |
| | PYYYYMDVWG | YKSYPVTFG | | | | | | |
| | KGTTVTVSS | QGTKVEIK | | | | | | |
| | (SEQ ID | (SEQ ID | | | | | | |
| | NO: 591) | NO: 1369) | | | | | | |
| MIAB152 | EVQLLESGGG | DIQMTQSPS | FTFSD | SYISG | CARDR | RASQS | SSLQS | QQYKS |
| | LVQPGGSLRL | SLSASVGDR | FWMH | DSGYT | PYYYY | VSSYL | (SEQ | YPVT |
| | SCAASGFTES | VTITCRASQ | (SEQ | NYA | MDVW | A | ID | (SEQ |
| | DFWMHWVRQA | SVSSYLAWY | ID | (SEQ | (SEQ | (SEQ | NO: | ID |
| | PGKGLEWISY | QQKPGKAPK | NO: | ID | ID | ID | 362) | NO: |
| | ISGDSGYTNY | LLIYAASSL | 359) | NO: | NO: | NO: | | 363) |
| | ADSVKGRFTI | QSGVPSRES | | 170) | 360) | 1415) | | |
| | SRDNSKNTLY | GSGSGTDFT | | | | | | |
| | LQMNSLRAED | LTISSLQPE | | | | | | |
| | TAVYYCARDR | DFATYYCQQ | | | | | | |
| | PYYYYMDVWG | YKSYPVTFG | | | | | | |
| | KGTTVTVSS | QGTKVEIK | | | | | | |
| | (SEQ ID | (SEQ ID | | | | | | |
| | NO: 591) | NO: 1370) | | | | | | |
| MIAB153 | EVQLLESGGG | DIQMTQSPS | FTFSD | SYISG | CARDR | RASQS | SSLQS | QQYKS |
| | LVQPGGSLRL | SLSASVGDR | FWMH | DSGYT | PYYYY | VSSSL | (SEQ | YPVT |
| | SCAASGETFS | VTITCRASQ | (SEQ | NYA | MDVW | N | ID | (SEQ |
| | DFWMHWVRQA | SVSSSLNWY | ID | (SEQ | (SEQ | (SEQ | NO: | ID |
| | PGKGLEWISY | QQKPGKAPK | NO: | ID | ID | ID | 362) | NO: |
| | ISGDSGYTNY | LLIYAASSL | 359) | NO: | NO: | NO: | | 363) |
| | ADSVKGRFTI | QSGVPSRES | | 170) | 360) | 1416) | | |
| | SRDNSKNTLY | GSGSGTDFT | | | | | | |
| | LQMNSLRAED | LTISSLQPE | | | | | | |
| | TAVYYCARDR | DFATYYCQQ | | | | | | |
| | PYYYYMDVWG | YKSYPVTFG | | | | | | |
| | KGTTVTVSSV | QGTKVEIK | | | | | | |
| | (SEQ ID | (SEQ ID | | | | | | |
| | NO: 1548) | NO: 1371) | | | | | | |
| MIAB154 | EVQLLESGGG | DIQMTQSPS | FTFSD | SYISG | CARDR | RASQS | SSLQS | QQYKS |
| | LVQPGGSLRL | SLSASVGDR | FWMH | DSGYT | PYYYY | VSRYL | (SEQ | YPVT |
| | SCAASGFTFS | VTITCRASQ | (SEQ | NYA | MDVW | N | ID | (SEQ |
| | DFWMHWVRQA | SVSRYLNWY | ID | (SEQ | (SEQ | (SEQ | NO: | ID |
| | PGKGLEWISY | QQKPGKAPK | NO: | ID | ID | ID | 362) | NO: |
| | ISGDSGYTNY | LLIYAASSL | 359) | NO: | NO: | NO: | | 363) |
| | ADSVKGRFTI | QSGVPSRES | | 170) | 360) | 1417) | | |
| | SRDNSKNTLY | GSGSGTDFT | | | | | | |
| | LQMNSLRAED | LTISSLQPE | | | | | | |
| | TAVYYCARDR | DFATYYCQQ | | | | | | |
| | PYYYYMDVWG | YKSYPVTFG | | | | | | |
| | KGTTVTVSS | QGTKVEIK | | | | | | |
| | (SEQ ID | (SEQ ID | | | | | | |
| | NO: 591) | NO: 1372) | | | | | | |
| MIAB155 | EVQLLESGGG | DIQMTQSPS | FTFSD | SYISG | CARDR | RASQS | SSLQS | ΩQYKS |
| | LVQPGGSLRL | SLSASVGDR | FWMH | DSGYT | PYYYY | ISSSL | (SEQ | YPVT |
| | SCAASGFTES | VTITCRASQ | (SEQ | NYA | MDVW | N | ID | (SEQ |
| | DFWMHWVRQA | SISSSLNWY | ID | (SEQ | (SEQ | (SEQ | NO: | ID |
| | PGKGLEWISY | QQKPGKAPK | NO: | ID | ID | ID | 362) | NO: |
| | ISGDSGYTNY | LLIYAASSL | 359) | NO: | NO: | NO: | | 363) |
| | ADSVKGRFTI | QSGVPSRES | | 170) | 360) | 1418) | | |
| | SRDNSKNTLY | GSGSGTDFT | | | | | | |
| | LQMNSLRAED | LTISSLQPE | | | | | | |
| | TAVYYCARDR | DFATYYCQQ | | | | | | |
| | PYYYYMDVWG | YKSYPVTFG | | | | | | |
| | KGTTVTVSS | QGTKVEIK | | | | | | |
| | (SEQ ID | (SEQ ID | | | | | | |
| | NO: 591) | NO: 1373) | | | | | | |
| MIAB156 | EVQLLESGGG | DIQMTQSPS | FTFSD | SYISG | CARDR | RASQS | SSLQS | QQYKS |
| | LVQPGGSLRL | SLSASVGDR | FWMH | DSGYT | PYYYY | ISRYL | (SEQ | YPVT |
| | SCAASGFTFS | VTITCRASQ | (SEQ | NYA | MDVW | N | ID | (SEQ |
| | DFWMHWVRQA | SISRYLNWY | ID | (SEQ | (SEQ | (SEQ | NO: | ID |
| | PGKGLEWISY | QQKPGKAPK | NO: | ID | ID | ID | 362) | NO: |
| | ISGDSGYTNY | LLIYAASSL | 359) | NO: | NO: | NO: | | 363) |
| | ADSVKGRFTI | QSGVPSRFS | | 170) | 360) | 1419) | | |
| | SRDNSKNTLY | GSGSGTDFT | | | | | | |
| | LQMNSLRAED | LTISSLQPE | | | | | | |
| | TAVYYCARDR | DFATYYCOQ | | | | | | |
| | PYYYYMDVWG | YKSYPVTFG | | | | | | |
| | KGTTVTVSS | QGTKVEIK | | | | | | |
| | (SEQ ID | (SEQ ID | | | | | | |
| | NO: 591) | NO: 1374) | | | | | | |
| MIAB157 | EVQLLESGGG | DIQMTQSPS | FTFSD | SYISG | CARDR | RASQS | SSLQS | QQYKS |
| | LVQPGGSLRL | SLSASVGDR | FWMH | DSGYT | PYYYY | ISSYL | (SEQ | YPVT |
| | SCAASGFTES | VTITCRASQ | (SEQ | NYA | MDVW | A | ID | (SEQ |
| | DFWMHWVRQA | SISSYLAWY | ID | (SEQ | (SEQ | (SEQ | NO: | ID |
| | PGKGLEWISY | QQKPGKAPK | NO: | ID | ID | ID | 362) | NO: |
| | ISGDSGYTNY | LLIYAASSL | 359) | NO: | NO: | NO: | | 363) |
| | ADSVKGRFTI | QSGVPSRFS | | 170) | 360) | 1420) | | |
| | SRDNSKNTLY | GSGSGTDFT | | | | | | |
| | LQMNSLRAED | LTISSLQPE | | | | | | |
| | TAVYYCARDR | DFATYYCQQ | | | | | | |
| | PYYYYMDVWG | YKSYPVTFG | | | | | | |
| | KGTTVTVSS | QGTKVEIK | | | | | | |
| | (SEQ ID | (SEQ ID | | | | | | |
| | NO: 591) | NO: 1375) | | | | | | |
| MIAB158 | EVQLLESGGG | DIQMTQSPS | FTFSD | SYISG | CARDR | RASQS | SSLQS | QQYKS |
| | LVQPGGSLRL | SLSASVGDR | FWMH | DSGYT | PYYYY | VSSYL | (SEQ | YPVT |
| | SCAASGFTES | VTITCRASQ | (SEQ | NYA | MDVW | N | ID | (SEQ |
| | DFWMHWVRQA | SVSSYLNWY | ID | (SEQ | (SEQ | (SEQ | NO: | ID |
| | PGKGLEWISY | QQKPGKAPK | NO: | ID | ID | ID | 362) | NO: |
| | ISGDSGYTNY | LLIYAASSL | 359) | NO: | NO: | NO: | | 363) |
| | ADSVKGRFTI | QSGVPSRES | | 170) | 360) | 1421) | | |
| | SRDNSKNTLY | GSGSGTDFT | | | | | | |
| | LQMNSLRAED | LTISSLQPE | | | | | | |
| | TAVYYCARDR | DFATYYCQQ | | | | | | |
| | PYYYYMDVWG | YKSYPVTFG | | | | | | |
| | KGTTVTVSS | QGTKVEIK | | | | | | |
| | (SEQ ID | (SEQ ID | | | | | | |
| | NO: 591) | NO: 1376) | | | | | | |
| MIAB159 | EVQLLESGGG | DIQMTQSPS | FTFSD | SYISG | CARDR | RASQS | SSLQS | QQYKS |
| | LVQPGGSLRL | SLSASVGDR | FWMH | ESGYT | PYYYY | VSRSL | (SEQ | YPVT |
| | SCAASGFTES | VTITCRASQ | (SEQ | NYA | MDVW | A | ID | (SEQ |
| | DFWMHWVRQA | SVSRSLAWY | ID | (SEQ | (SEQ | (SEQ | NO: | ID |
| | PGKGLEWISY | QQKPGKAPK | NO: | ID | ID | ID | 362) | NO: |
| | ISGESGYTNY | LLIYAASSL | 359) | NO: | NO: | NO: | | 363) |
| | ADSVKGRFTI | QSGVPSRFS | | 1422) | 360) | 361) | | |
| | SRDNSKNTLY | GSGSGTDFT | | | | | | |
| | LQMNSLRAED | LTISSLQPE | | | | | | |
| | TAVYYCARDR | DFATYYCQQ | | | | | | |
| | PYYYYMDVWG | YKSYPVTFG | | | | | | |
| | KGTTVTVSS | QGTKVEIK | | | | | | |
| | (SEQ ID | (SEQ ID | | | | | | |
| | NO: 1377) | NO: 592) | | | | | | |
| MIAB160 | EVQLLESGGG | DIQMTQSPS | FTFSD | SYISG | CARDR | RASQS | SSLQS | QQYKS |
| | LVQPGGSLRL | SLSASVGDR | FWMH | DSGYT | PYYYY | VSRSL | (SEQ | YPVT |
| | SCAASGFTES | VTITCRASQ | (SEQ | QYA | MDVW | A | ID | (SEQ |
| | DFWMHWVRQA | SVSRSLAWY | ID | (SEQ | (SEQ | (SEQ | NO: | ID |
| | PGKGLEWISY | QQKPGKAPK | NO: | ID | ID | ID | 362) | NO: |
| | ISGDSGYTQY | LLIYAASSL | 359) | NO: | NO: | NO: | | 363) |
| | ADSVKGRFTI | QSGVPSRES | | 1423) | 360) | 361) | | |
| | SRDNSKNTLY | GSGSGTDFT | | | | | | |
| | LQMNSLRAED | LTISSLQPE | | | | | | |
| | TAVYYCARDR | DFATYYCOQ | | | | | | |
| | PYYYYMDVWG | YKSYPVTFG | | | | | | |
| | KGTTVTVSS | QGTKVEIK | | | | | | |
| | (SEQ ID | (SEQ ID | | | | | | |
| | NO: 1378) | NO: 592) | | | | | | |
| MIAB161 | EVQLLESGGG | DIQMTQSPS | FTFSD | SYISG | CARDR | RASQS | SSLQS | QQYKS |
| | LVQPGGSLRL | SLSASVGDR | FWMH | DSGYT | PYYYY | VSRSL | (SEQ | YPVT |
| | SCAASGFTFS | VTITCRASQ | (SEQ | NYA | MDVW | A | ID | (SEQ |
| | DFWMHWVRQA | SVSRSLAWY | ID | (SEQ | (SEQ | (SEQ | NO: | ID |
| | PGKGLEWISY | QQKPGKAPK | NO: | ID | ID | ID | 362) | NO: |
| | ISGDSGYTNY | LLIYAASSL | 359) | NO: | NO: | NO: | | 363) |
| | ADSVKGRFTI | QSGVPSRES | | 170) | 360) | 361) | | |
| | SRDQSKNTLY | GSGSGTDFT | | | | | | |
| | LQMNSLRAED | LTISSLQPE | | | | | | |
| | TAVYYCARDR | DFATYYCQQ | | | | | | |
| | PYYYYMDVWG | YKSYPVTFG | | | | | | |
| | KGTTVTVSS | QGTKVEIK | | | | | | |
| | (SEQ ID | (SEQ ID | | | | | | |
| | NO: 1379) | NO: 592) | | | | | | |
| MIAB162 | EVQLLESGGG | DIQMTQSPS | FTFSD | SYISG | CARDR | RASQS | SSLQS | QQYKS |
| | LVQPGGSLRL | SLSASVGDR | FWMH | DSGYT | PYYYY | VSRSL | (SEQ | YPVT |
| | SCAASGFTFS | VTITCRASQ | (SEQ | NYA | MDVW | G | ID | (SEQ |
| | DFWMHWVRQA | SVSRSLGWY | ID | (SEQ | (SEQ | (SEQ | NO: | ID |
| | PGKGLEWISY | QQKPGKAPK | NO: | ID | ID | ID | 362) | NO: |
| | ISGDSGYTNY | LLIYAASSL | 359) | NO: | NO: | NO: | | 363) |
| | ADSVKGRFTI | QSGVPSRFS | | 170) | 360) | 1424) | | |
| | SRDNSKNTLY | GSGSGTDFT | | | | | | |
| | LQMNSLRAED | LTISSLQPE | | | | | | |
| | TAVYYCARDR | DFATYYCQQ | | | | | | |
| | PYYYYMDVWG | YKSYPVTFG | | | | | | |
| | KGTTVTVSS | QGTKVEIK | | | | | | |
| | (SEQ ID | (SEQ ID | | | | | | |
| | NO: 591) | NO: 1380) | | | | | | |
| MIAB163 | EVQLLESGGG | DIQMTQSPS | FTFSD | SYISG | CARDR | RASQS | SSLQS | QQYKS |
| | LVQPGGSLRL | SLSASVGDR | FWMH | DSGYT | PYYYY | VSRSL | (SEQ | YPVT |
| | SCAASGFTFS | VTITCRASQ | (SEQ | NYA | MDVW | D | ID | (SEQ |
| | DFWMHWVRQA | SVSRSLDWY | ID | (SEQ | (SEQ | (SEQ | NO: | ID |
| | PGKGLEWISY | QQKPGKAPK | NO: | ID | ID | ID | 362) | NO: |
| | ISGDSGYTNY | LLIYAASSL | 359) | NO: | NO: | NO: | | 363) |
| | ADSVKGRFTI | QSGVPSRES | | 170) | 360) | 1425) | | |
| | SRDNSKNTLY | GSGSGTDFT | | | | | | |
| | LQMNSLRAED | LTISSLQPE | | | | | | |
| | TAVYYCARDR | DFATYYCQQ | | | | | | |
| | PYYYYMDVWG | YKSYPVTFG | | | | | | |
| | KGTTVTVSS | QGTKVEIK | | | | | | |
| | (SEQ ID | (SEQ ID | | | | | | |
| | NO: 591) | NO: 1381) | | | | | | |
| MIAB164 | EVQLLESGGG | DIQMTQSPS | FTFSD | SYISG | CARDR | RASQS | SSLQS | QQYKS |
| | LVQPGGSLRL | SLSASVGDR | FWMH | DSGYT | PYYYY | VSRSL | (SEQ | YPVT |
| | SCAASGFTES | VTITCRASQ | (SEQ | NYA | MDVW | T | ID | (SEQ |
| | DFWMHWVRQA | SVSRSLTWY | ID | (SEQ | (SEQ | (SEQ | NO: | ID |
| | PGKGLEWISY | QQKPGKAPK | NO: | ID | ID | ID | 362) | NO: |
| | ISGDSGYTNY | LLIYAASSL | 359) | NO: | NO: | NO: | | 363) |
| | ADSVKGRFTI | QSGVPSRFS | | 170) | 360) | 1426) | | |
| | SRDNSKNTLY | GSGSGTDFT | | | | | | |
| | LQMNSLRAED | LTISSLQPE | | | | | | |
| | TAVYYCARDR | DFATYYCQQ | | | | | | |
| | PYYYYMDVWG | YKSYPVTFG | | | | | | |
| | KGTTVTVSS | QGTKVEIK | | | | | | |
| | (SEQ ID | (SEQ ID | | | | | | |
| | NO: 591) | NO: 1382) | | | | | | |
| MIAB165 | EVQLLESGGG | DIQMTQSPS | FTFSD | SYISG | CARDR | RASQS | SSLQS | QQYKS |
| | LVQPGGSLRL | SLSASVGDR | FWMH | DSGYT | PYYYY | VSRSL | (SEQ | YPVT |
| | SCAASGFTES | VTITCRASQ | (SEQ | NYA | MDVW | S | ID | (SEQ |
| | DFWMHWVRQA | SVSRSLSWY | ID | (SEQ | (SEQ | (SEQ | NO: | ID |
| | PGKGLEWISY | QQKPGKAPK | NO: | ID | ID | ID | 362) | NO: |
| | ISGDSGYTNY | LLIYAASSL | 359) | NO: | NO: | NO: | | 363) |
| | ADSVKGRFTI | QSGVPSRFS | | 170) | 360) | 1427) | | |
| | SRDNSKNTLY | GSGSGTDFT | | | | | | |
| | LQMNSLRAED | LTISSLQPE | | | | | | |
| | TAVYYCARDR | DFATYYCQQ | | | | | | |
| | PYYYYMDVWG | YKSYPVTFG | | | | | | |
| | KGTTVTVSS | QGTKVEIK | | | | | | |
| | (SEQ ID | (SEQ ID | | | | | | |
| | NO: 591) | NO: 1383) | | | | | | |
| MIAB166 | EVQLLESGGG | DIQMTQSPS | FTFSD | SYISG | CARDR | RASQS | SSLQS | QQYKS |
| | LVQPGGSLRL | SLSASVGDR | FWMH | DSGYT | PYYYY | VSRSL | (SEQ | YPVT |
| | SCAASGFTES | VTITCRASQ | (SEQ | NYA | MDVW | E | ID | (SEQ |
| | DFWMHWVRQA | SVSRSLEWY | ID | (SEQ | (SEQ | (SEQ | NO: | ID |
| | PGKGLEWISY | QQKPGKAPK | NO: | ID | ID | ID | 362) | NO: |
| | ISGDSGYTNY | LLIYAASSL | 359) | NO: | NO: | NO: | | 363) |
| | ADSVKGRFTI | QSGVPSRES | | 170) | 360) | 1428) | | |
| | SRDNSKNTLY | GSGSGTDFT | | | | | | |
| | LQMNSLRAED | LTISSLQPE | | | | | | |
| | TAVYYCARDR | DFATYYCQQ | | | | | | |
| | PYYYYMDVWG | YKSYPVTFG | | | | | | |
| | KGTTVTVSS | QGTKVEIK | | | | | | |
| | (SEQ ID | (SEQ ID | | | | | | |
| | NO: 591) | NO: 1384) | | | | | | |
| MIAB167 | EVQLLESGGG | DIQMTQSPS | FTFSD | SYISG | CARDR | RASQS | SSLQS | QQYKS |
| | LVQPGGSLRL | SLSASVGDR | FWMH | DSGYT | PYYYY | VSRSL | (SEQ | YPVT |
| | SCAASGFTFS | VTITCRASQ | (SEQ | NYA | MDVW | K | ID | (SEQ |
| | DFWMHWVRQA | SVSRSLKWY | ID | (SEQ | (SEQ | (SEQ | NO: | ID |
| | PGKGLEWISY | QQKPGKAPK | NO: | ID | ID | ID | 362) | NO: |
| | ISGDSGYTNY | LLIYAASSL | 359) | NO: | NO: | NO: | | 363) |
| | ADSVKGRFTI | QSGVPSRES | | 170) | 360) | 1429) | | |
| | SRDNSKNTLY | GSGSGTDFT | | | | | | |
| | LQMNSLRAED | LTISSLQPE | | | | | | |
| | TAVYYCARDR | DFATYYCQQ | | | | | | |
| | PYYYYMDVWG | YKSYPVTFG | | | | | | |
| | KGTTVTVSS | QGTKVEIK | | | | | | |
| | (SEQ ID | (SEQ ID | | | | | | |
| | NO: 591) | NO: 1385) | | | | | | |
| MIAB168 | EVQLLESGGG | DIQMTQSPS | FTFSD | SYISG | CARDR | RASQS | SSLQS | QQYKS |
| | LVQPGGSLRL | SLSASVGDR | FWMH | DSGYT | PYYYY | VSRSL | (SEQ | YPVT |
| | SCAASGFTES | VTITCRASQ | (SEQ | NYA | MDVW | L | ID | (SEQ |
| | DFWMHWVRQA | SVSRSLLWY | ID | (SEQ | (SEQ | (SEQ | NO: | ID |
| | PGKGLEWISY | QQKPGKAPK | NO: | ID | ID | ID | 362) | NO: |
| | ISGDSGYTNY | LLIYAASSL | 359) | NO: | NO: | NO: | | 363) |
| | ADSVKGRFTI | QSGVPSRES | | 170) | 360) | 1430) | | |
| | SRDNSKNTLY | GSGSGTDFT | | | | | | |
| | LQMNSLRAED | LTISSLQPE | | | | | | |
| | TAVYYCARDR | DFATYYCQQ | | | | | | |
| | PYYYYMDVWG | YKSYPVTFG | | | | | | |
| | KGTTVTVSS | QGTKVEIK | | | | | | |
| | (SEQ ID | (SEQ ID | | | | | | |
| | NO: 591) | NO: 1386) | | | | | | |
| MIAB169 | EVQLLESGGG | DIQMTQSPS | FTFSD | SYISG | CARDR | RASQS | SSLQS | QQYKS |
| | LVQPGGSLRL | SLSASVGDR | FWMH | DSGYT | PYYYI | VSRSL | (SEQ | YPVT |
| | SCAASGFTFS | VTITCRASQ | (SEQ | NYA | MDVW | A | ID | (SEQ |
| | DFWMHWVRQA | SVSRSLAWY | ID | (SEQ | (SEQ | (SEQ | NO: | ID |
| | PGKGLEWISY | QQKPGKAPK | NO: | ID | ID | ID | 362) | NO: |
| | ISGDSGYTNY | LLIYAASSL | 359) | NO: | NO: | NO: | | 363) |
| | ADSVKGRFTI | QSGVPSRFS | | 170) | 1431) | 361) | | |
| | SRDNSKNTLY | GSGSGTDFT | | | | | | |
| | LQMNSLRAED | LTISSLQPE | | | | | | |
| | TAVYYCARDR | DFATYYCQQ | | | | | | |
| | PYYYIMDVWG | YKSYPVTFG | | | | | | |
| | KGTTVTVSS | QGTKVEIK | | | | | | |
| | (SEQ ID | (SEQ ID | | | | | | |
| | NO: 1387) | NO: 592) | | | | | | |
| MIAB170 | EVQLLESGGG | DIQMTQSPS | FTFSD | SYISG | CARDR | RASQS | SSLQS | QQYKS |
| | LVQPGGSLRL | SLSASVGDR | FWMH | DSGYT | PYYYW | VSRSL | (SEQ | YPVT |
| | SCAASGFTFS | VTITCRASQ | (SEQ | NYA | MDVW | A | ID | (SEQ |
| | DFWMHWVRQA | SVSRSLAWY | ID | (SEQ | (SEQ | (SEQ | NO: | ID |
| | PGKGLEWISY | QQKPGKAPK | NO: | ID | ID | ID | 362) | NO: |
| | ISGDSGYTNY | LLIYAASSL | 359) | NO: | NO: | NO: | | 363) |
| | ADSVKGRFTI | QSGVPSRFS | | 170) | 1432) | 361) | | |
| | SRDNSKNTLY | GSGSGTDET | | | | | | |
| | LQMNSLRAED | LTISSLQPE | | | | | | |
| | TAVYYCARDR | DFATYYCQQ | | | | | | |
| | PYYYWMDVWG | YKSYPVTFG | | | | | | |
| | KGTTVTVSS | QGTKVEIK | | | | | | |
| | (SEQ ID | (SEQ ID | | | | | | |
| | NO: 1388) | NO: 592) | | | | | | |
| MIAB171 | EVQLLESGGG | DIQMTQSPS | FTFSD | SYISG | CARDR | RASQS | SSLQS | QQYKS |
| | LVQPGGSLRL | SLSASVGDR | FWMH | DSGYT | PSYYY | VSRSL | (SEQ | YPVT |
| | SCAASGFTFS | VTITCRASQ | (SEQ | NYA | MDVW | A | ID | (SEQ |
| | DFWMHWVRQA | SVSRSLAWY | ID | (SEQ | (SEQ | (SEQ | NO: | ID |
| | PGKGLEWISY | QQKPGKAPK | NO: | ID | ID | ID | 362) | NO: |
| | ISGDSGYTNY | LLIYAASSL | 359) | NO: | NO: | NO: | | 363) |
| | ADSVKGRFTI | QSGVPSRES | | 170) | 1433) | 361) | | |
| | SRDNSKNTLY | GSGSGTDFT | | | | | | |
| | LQMNSLRAED | LTISSLQPE | | | | | | |
| | TAVYYCARDR | DFATYYCQQ | | | | | | |
| | PSYYYMDVWG | YKSYPVTFG | | | | | | |
| | KGTTVTVSS | QGTKVEIK | | | | | | |
| | (SEQ ID | (SEQ ID | | | | | | |
| | NO: 1389) | NO: 592) | | | | | | |
| MIAB172 | EVQLLESGGG | DIQMTQSPS | FTFSD | SYISG | CARDR | RASQS | SSLQS | QQYKS |
| | LVQPGGSLRL | SLSASVGDR | FWMH | DSGYT | PTYYY | VSRSL | (SEQ | YPVT |
| | SCAASGFTES | VTITCRASQ | (SEQ | NYA | MDVW | A | ID | (SEQ |
| | DFWMHWVRQA | SVSRSLAWY | ID | (SEQ | (SEQ | (SEQ | NO: | ID |
| | PGKGLEWISY | QQKPGKAPK | NO: | ID | ID | ID | 362) | NO: |
| | ISGDSGYTNY | LLIYAASSL | 359) | NO: | NO: | NO: | | 363) |
| | ADSVKGRFTI | QSGVPSRFS | | 170) | 1434) | 361) | | |
| | SRDNSKNTLY | GSGSGTDFT | | | | | | |
| | LQMNSLRAED | LTISSLQPE | | | | | | |
| | TAVYYCARDR | DFATYYCQQ | | | | | | |
| | PTYYYMDVWG | YKSYPVTFG | | | | | | |
| | KGTTVTVSS | QGTKVEIK | | | | | | |
| | (SEQ ID | (SEQ ID | | | | | | |
| | NO: 1390) | NO: 592) | | | | | | |
| MIAB173 | EVQLLESGGG | DIQMTQSPS | FTFSD | SYISG | CARDR | RASQS | SSLQS | QQYKS |
| | LVQPGGSLRL | SLSASVGDR | FWMH | DSGYT | PYYYY | VSRSL | (SEQ | YPVT |
| | SCAASGFTFS | VTITCRASQ | (SEQ | NYA | MDVW | A | ID | (SEQ |
| | DFWMHWVRQA | SVSRSLAWY | ID | (SEQ | (SEQ | (SEQ | NO: | ID |
| | PGKGLEWISY | QQKPGKAPK | NO: | ID | ID | ID | 362) | NO: |
| | ISGDSGYTNY | LLIYAASSL | 359) | NO: | NO: | NO: | | 363) |
| | ADSVKGRFTI | QSGVPSRFS | | 170) | 360) | 361) | | |
| | SRDNSKNTLY | GSGSGTDET | | | | | | |
| | LQMNSLRAED | LTISSLQPE | | | | | | |
| | TAVYYCARDR | DFATYYCQQ | | | | | | |
| | PYYYYMDVWG | YKSYPVTFG | | | | | | |
| | KGTTVTVSS | QGTKVEIK | | | | | | |
| | (SEQ ID | (SEQ ID | | | | | | |
| | NO: 591) | NO: 592) | | | | | | |
| MIAB174 | EVQLLESGGG | DIQMTQSPS | FTFSD | SYISG | CARDR | RASQS | SSLQS | QQYKS |
| | LVQPGGSLRL | SLSASVGDR | YWMH | DSGYT | PYYYY | VSRSL | (SEQ | YPVT |
| | SCAASGFTFS | VTITCRASQ | (SEQ | NYA | MDVW | A | ID | (SEQ |
| | DYWMHWVRQA | SVSRSLAWY | ID | (SEQ | (SEQ | (SEQ | NO: | ID |
| | PGKGLEWISY | QQKPGKAPK | NO: | ID | ID | ID | 362) | NO: |
| | ISGDSGYTNY | LLIYAASSL | 1435) | NO: | NO: | NO: | | 363) |
| | ADSVKGRFTI | QSGVPSRES | | 170) | 360) | 361) | | |
| | SRDNSKNTLY | GSGSGTDFT | | | | | | |
| | LQMNSLRAED | LTISSLQPE | | | | | | |
| | TAVYYCARDR | DFATYYCQQ | | | | | | |
| | PYYYYMDVWG | YKSYPVTFG | | | | | | |
| | KGTTVTVSS | QGTKVEIK | | | | | | |
| | (SEQ ID | (SEQ ID | | | | | | |
| | NO: 1391) | NO: 592) | | | | | | |
| MIAB175 | EVQLLESGGG | DIQMTQSPS | FTFSS | SYISG | CARDR | RASQS | SSLQS | QQYKS |
| | LVQPGGSLRL | SLSASVGDR | YWMH | DSGYT | PYYYY | VSRSL | (SEQ | YPVT |
| | SCAASGFTFS | VTITCRASQ | (SEQ | NYA | MDVW | A | ID | (SEQ |
| | SYWMHWVRQA | SVSRSLAWY | ID | (SEQ | (SEQ | (SEQ | NO: | ID |
| | PGKGLEWISY | QQKPGKAPK | NO: | ID | ID | ID | 362) | NO: |
| | ISGDSGYTNY | LLIYAASSL | 83) | NO: | NO: | NO: | | 363) |
| | ADSVKGRFTI | QSGVPSRFS | | 170) | 360) | 361) | | |
| | SRDNSKNTLY | GSGSGTDFT | | | | | | |
| | LQMNSLRAED | LTISSLQPE | | | | | | |
| | TAVYYCARDR | DFATYYCQQ | | | | | | |
| | PYYYYMDVWG | YKSYPVTFG | | | | | | |
| | KGTTVTVSS | QGTKVEIK | | | | | | |
| | (SEQ ID | (SEQ ID | | | | | | |
| | NO: 1392) | NO: 592) | | | | | | |
| MIAB176 | EVQLLESGGG | DIQMTQSPS | FTFSD | SAISG | CARDR | RASQS | SSLQS | QQYKS |
| | LVQPGGSLRL | SLSASVGDR | FWMH | SSGST | PYYYY | VSRSL | (SEQ | YPVT |
| | SCAASGFTES | VTITCRASQ | (SEQ | YYA | MDVW | A | ID | (SEQ |
| | DFWMHWVRQA | SVSRSLAWY | ID | (SEQ | (SEQ | (SEQ | NO: | ID |
| | PGKGLEWISA | QQKPGKAPK | NO: | ID | ID | ID | 362) | NO: |
| | ISGSSGSTYY | LLIYAASSL | 359) | NO: | NO: | NO: | | 363) |
| | ADSVKGRFTI | QSGVPSRES | | 1436) | 360) | 361) | | |
| | SRDNSKNTLY | GSGSGTDFT | | | | | | |
| | LQMNSLRAED | LTISSLQPE | | | | | | |
| | TAVYYCARDR | DFATYYCQQ | | | | | | |
| | PYYYYMDVWG | YKSYPVTFG | | | | | | |
| | KGTTVTVSS | QGTKVEIK | | | | | | |
| | (SEQ ID | (SEQ ID | | | | | | |
| | NO: 1393) | NO: 592) | | | | | | |
| MIAB177 | EVQLLESGGG | DIQMTQSPS | FTFSD | SAISG | CARDR | RASQS | SSLQS | QQYKS |
| | LVQPGGSLRL | SLSASVGDR | FWMH | SGGST | PYYYY | VSRSL | (SEQ | YPVT |
| | SCAASGFTFS | VTITCRASQ | (SEQ | YYA | MDVW | A | ID | (SEQ |
| | DFWMHWVRQA | SVSRSLAWY | ID | (SEQ | (SEQ | (SEQ | NO: | ID |
| | PGKGLEWVSA | QQKPGKAPK | NO: | ID | ID | ID | 362) | NO: |
| | ISGSGGSTYY | LLIYAASSL | 359) | NO: | NO: | NO: | | 363) |
| | ADSVKGRFTI | QSGVPSRES | | 103) | 360) | 361) | | |
| | SRDNSKNTLY | GSGSGTDFT | | | | | | |
| | LQMNSLRAED | LTISSLQPE | | | | | | |
| | TAVYYCARDR | DFATYYCQQ | | | | | | |
| | PYYYYMDVWG | YKSYPVTFG | | | | | | |
| | KGTTVTVSS | QGTKVEIK | | | | | | |
| | (SEQ ID | (SEQ ID | | | | | | |
| | NO: 1357) | NO: 592) | | | | | | |
| MIAB178 | EVQLLESGGG | DIQMTQSPS | FTFSS | SAISG | CARDR | RASQS | SSLQS | QQYKS |
| | LVQPGGSLRL | SLSASVGDR | YWMH | SSGST | PYYYY | VSRSL | (SEQ | YPVT |
| | SCAASGFTFS | VTITCRASQ | (SEQ | YYA | MDVW | A | ID | (SEQ |
| | SYWMHWVRQA | SVSRSLAWY | ID | (SEQ | (SEQ | (SEQ | NO: | ID |
| | PGKGLEWISA | QQKPGKAPK | NO: | ID | ID | ID | 362) | NO: |
| | ISGSSGSTYY | LLIYAASSL | 83) | NO: | NO: | NO: | | 363) |
| | ADSVKGRFTI | QSGVPSRES | | 1436) | 360) | 361) | | |
| | SRDNSKNTLY | GSGSGTDFT | | | | | | |
| | LQMNSLRAED | LTISSLQPE | | | | | | |
| | TAVYYCARDR | DFATYYCQQ | | | | | | |
| | PYYYYMDVWG | YKSYPVTFG | | | | | | |
| | KGTTVTVSS | QGTKVEIK | | | | | | |
| | (SEQ ID | (SEQ ID | | | | | | |
| | NO: 1394) | NO: 592) | | | | | | |
| MIAB179 | EVQLLESGGG | DIQMTQSPS | FTFSS | SAISG | CARDR | RASQS | SSLQS | QQYKS |
| | LVQPGGSLRL | SLSASVGDR | YWMH | SGGST | PYYYY | ISRYL | (SEQ | YPVT |
| | SCAASGFTFS | VTITCRASQ | (SEQ | YYA | MDVW | A | ID | (SEQ |
| | SYWMHWVRQA | SISRYLAWY | ID | (SEQ | (SEQ | (SEQ | NO: | ID |
| | PGKGLEWVSA | QQKPGKAPK | NO: | ID | ID | ID | 362) | NO: |
| | ISGSGGSTYY | LLIYAASSL | 83) | NO: | NO: | NO: | | 363) |
| | ADSVKGRFTI | QSGVPSRES | | 103) | 360) | 1413) | | |
| | SRDNSKNTLY | GSGSGTDFT | | | | | | |
| | LQMNSLRAED | LTISSLQPE | | | | | | |
| | TAVYYCARDR | DFATYYCQQ | | | | | | |
| | PYYYYMDVWG | YKSYPVTFG | | | | | | |
| | KGTTVTVSS | QGTKVEIK | | | | | | |
| | (SEQ ID | (SEQ ID | | | | | | |
| | NO: 1395) | NO: 1368) | | | | | | |
| MIAB180 | EVQLLESGGG | DIQMTQSPS | FTFSS | SAISG | CARDR | RASQS | SSLQS | QQYKS |
| | LVQPGGSLRL | SLSASVGDR | YWMH | SGGST | PYYYY | VSRSL | (SEQ | YPVT |
| | SCAASGFTES | VTITCRASQ | (SEQ | YYA | MDVW | A | ID | (SEQ |
| | SYWMHWVRQA | SVSRSLAWY | ID | (SEQ | (SEQ | (SEQ | NO: | ID |
| | PGKGLEWVSA | QQKPGKAPK | NO: | ID | ID | ID | 362) | NO: |
| | ISGSGGSTYY | LLIYAASSL | 83) | NO: | NO: | NO: | | 363) |
| | ADSVKGRFTI | QSGVPSRFS | | 103) | 360) | 361) | | |
| | SRDNSKNTLY | GSGSGTDFT | | | | | | |
| | LQMNSLRAED | LTISSLQPE | | | | | | |
| | TAVYYCARDR | DFATYYCOQ | | | | | | |
| | PYYYYMDVWG | YKSYPVTFG | | | | | | |
| | KGTTVTVSS | QGTKVEIK | | | | | | |
| | (SEQ ID | (SEQ ID | | | | | | |
| | NO: 1395) | NO: 592) | | | | | | |
| MIAB181 | EVQLLESGGG | DIQMTQSPS | FTFSS | SAISG | CARDR | RASQS | SSLQS | QQYKS |
| | LVQPGGSLRL | SLSASVGDR | YWMH | SGGST | PYYYY | ISRYL | (SEQ | YPVT |
| | SCAASGFTFS | VTITCRASQ | (SEQ | YYA | MDVW | A | ID | (SEQ |
| | SYWMHWVRQA | SISRYLAWY | ID | (SEQ | (SEQ | (SEQ | NO: | ID |
| | PGKGLEWVSA | QQKPGKAPK | NO: | ID | ID | ID | 362) | NO: |
| | ISGSGGSTYY | LLIYAASSL | 83) | NO: | NO: | NO: | | 363) |
| | ADSVKGRFTI | QSGVPSRES | | 103) | 360) | 1413) | | |
| | SRDNSKNTLY | GSGSGTDFT | | | | | | |
| | LQMNSLRAED | LTISSLQPE | | | | | | |
| | TAVYYCARDR | DFATYYCQQ | | | | | | |
| | PYYYYMDVWG | YKSYPVTFG | | | | | | |
| | KGTTVTVSS | QGTKVEIK | | | | | | |
| | (SEQ ID | (SEQ ID | | | | | | |
| | NO: 1395) | NO: 1368) | | | | | | |

| | | | | | | | | |
|---|---|---|---|---|---|---|---|---|
| MIAB182 | EVQLLESGGG | DIQMTQSPS | FTFSS | SAISG | CARDR | RASQS | SSLQS | QQYKS |
| | LVQPGGSLRL | SLSASVGDR | YWMH | SGGST | PYYYY | ISRSL | (SEQ | YPVT |
| | SCAASGFTFS | VTITCRASQ | (SEQ | YYA | MDVW | A | ID | (SEQ |
| | SYWMHWVRQA | SISRSLAWY | ID | (SEQ | (SEQ | (SEQ | NO: | ID |
| | PGKGLEWVSA | QQKPGKAPK | NO: | ID | ID | ID | 362) | NO: |
| | ISGSGGSTYY | LLIYAASSL | 83) | NO: | NO: | NO: | | 363) |
| | ADSVKGRFTI | QSGVPSRES | | 103) | 360) | 1408) | | |
| | SRDNSKNTLY | GSGSGTDFT | | | | | | |
| | LQMNSLRAED | LTISSLQPE | | | | | | |
| | TAVYYCARDR | DFATYYCQQ | | | | | | |
| | PYYYYMDVWG | YKSYPVTFG | | | | | | |
| | KGTTVTVSS | QGTKVEIK | | | | | | |
| | (SEQ ID | (SEQ ID | | | | | | |
| | NO: 1395) | NO: 1363) | | | | | | |
| MIAB183 | EVQLLESGGG | DIQMTQSPS | FTFSS | SAISG | CARDR | RASQS | SSLQS | QQYKS |
| | LVQPGGSLRL | SLSASVGDR | YWMH | SGGST | PYYYY | VSSSL | (SEQ | YPVT |
| | SCAASGFTFS | VTITCRASQ | (SEQ | YYA | MDVW | A | ID | (SEQ |
| | SYWMHWVRQA | SVSSSLAWY | ID | (SEQ | (SEQ | (SEQ | NO: | ID |
| | PGKGLEWVSA | QQKPGKAPK | NO: | ID | ID | ID | 362) | NO: |
| | ISGSGGSTYY | LLIYAASSL | 83) | NO: | NO: | NO: | | 363) |
| | ADSVKGRFTI | QSGVPSRFS | | 103) | 360) | 1409) | | |
| | SRDNSKNTLY | GSGSGTDFT | | | | | | |
| | LQMNSLRAED | LTISSLQPE | | | | | | |
| | TAVYYCARDR | DFATYYCQQ | | | | | | |
| | PYYYYMDVWG | YKSYPVTFG | | | | | | |
| | KGTTVTVSS | QGTKVEIK | | | | | | |
| | (SEQ ID | (SEQ ID | | | | | | |
| | NO: 1395) | NO: 1364) | | | | | | |
| MIAB184 | EVQLLESGGG | DIQMTQSPS | FTFSS | SAISG | CARDR | RASQS | SSLQS | QQYKS |
| | LVQPGGSLRL | SLSASVGDR | YWMH | SGGST | PYYYY | ISSSL | (SEQ | YPVT |
| | SCAASGFTES | VTITCRASQ | (SEQ | YYA | MDVW | A | ID | (SEQ |
| | SYWMHWVRQA | SISSSLAWY | ID | (SEQ | (SEQ | (SEQ | NO: | ID |
| | PGKGLEWVSA | QQKPGKAPK | NO: | ID | ID | ID | 362) | NO: |
| | ISGSGGSTYY | LLIYAASSL | 83) | NO: | NO: | NO: | | 363) |
| | ADSVKGRFTI | QSGVPSRES | | 103) | 360) | 1412) | | |
| | SRDNSKNTLY | GSGSGTDFT | | | | | | |
| | LQMNSLRAED | LTISSLQPE | | | | | | |
| | TAVYYCARDR | DFATYYCQQ | | | | | | |
| | PYYYYMDVWG | YKSYPVTFG | | | | | | |
| | KGTTVTVSS | QGTKVEIK | | | | | | |
| | (SEQ ID | (SEQ ID | | | | | | |
| | NO: 1395) | NO: 1367) | | | | | | |
| MIAB185 | EVQLLESGGG | DIQMTQSPS | FTFSS | SYISG | CARDR | RASQS | SSLQS | QQYKS |
| | LVQPGGSLRL | SLSASVGDR | YWMH | DSGYT | PYYYI | ISRSL | (SEQ | YPVT |
| | SCAASGFTFS | VTITCRASQ | (SEQ | NYA | MDVW | A | ID | (SEQ |
| | SYWMHWVRQA | SISRSLAWY | ID | (SEQ | SEQ | (SEQ | NO: | ID |
| | PGKGLEWISY | QQKPGKAPK | NO: | ID | ID | ID | 362) | NO: |
| | ISGDSGYTNY | LLIYAASSL | 83) | NO: | NO: | NO: | | 363) |
| | ADSVKGRFTI | QSGVPSRFS | | 170) | 1431) | 1408) | | |
| | SRDNSKNTLY | GSGSGTDFT | | | | | | |
| | LQMNSLRAED | LTISSLQPE | | | | | | |
| | TAVYYCARDR | DFATYYCQQ | | | | | | |
| | PYYYIMDVWG | YKSYPVTFG | | | | | | |
| | KGTTVTVSS | QGTKVEIK | | | | | | |
| | (SEQ ID | (SEQ ID | | | | | | |
| | NO: 1396) | NO: 1363) | | | | | | |
| MIAB186 | EVQLLESGGG | DIQMTQSPS | FTFSS | SYISG | CARDR | RASQS | SSLQS | QQYKS |
| | LVQPGGSLRL | SLSASVGDR | YWMH | DSGYT | PYYYI | VSSSL | (SEQ | YPVT |
| | SCAASGFTFS | VTITCRASQ | (SEQ | NYA | MDVW | A | ID | (SEQ |
| | SYWMHWVRQA | SVSSSLAWY | ID | (SEQ | (SEQ | (SEQ | NO: | ID |
| | PGKGLEWISY | QQKPGKAPK | NO: | ID | ID | ID | 362) | NO: |
| | ISGDSGYTNY | LLIYAASSL | 83) | NO: | NO: | NO: | | 363) |
| | ADSVKGRFTI | QSGVPSRFS | | 170) | 1431) | 1409) | | |
| | SRDNSKNTLY | GSGSGTDFT | | | | | | |
| | LQMNSLRAED | LTISSLQPE | | | | | | |
| | TAVYYCARDR | DFATYYCOQ | | | | | | |
| | PYYYIMDVWG | YKSYPVTFG | | | | | | |
| | KGTTVTVSS | QGTKVEIK | | | | | | |
| | (SEQ ID | (SEQ ID | | | | | | |
| | NO: 1396) | NO: 1364) | | | | | | |
| MIAB187 | EVQLLESGGG | DIQMTQSPS | FTFSS | SYISG | CARDR | RASQS | SSLQS | QQYKS |
| | LVQPGGSLRL | SLSASVGDR | YWMH | DSGYT | PYYYI | ISSSL | (SEQ | YPVT |
| | SCAASGFTFS | VTITCRASQ | (SEQ | NYA | MDVW | A | ID | (SEQ |
| | SYWMHWVRQA | SISSSLAWY | ID | (SEQ | (SEQ | (SEQ | NO: | ID |
| | PGKGLEWISY | QQKPGKAPK | NO: | ID | ID | ID | 362) | NO: |
| | ISGDSGYTNY | LLIYAASSL | 83) | NO: | NO: | NO: | | 363) |
| | ADSVKGRFTI | QSGVPSRES | | 170) | 1431) | 1412) | | |
| | SRDNSKNTLY | GSGSGTDFT | | | | | | |
| | LQMNSLRAED | LTISSLQPE | | | | | | |
| | TAVYYCARDR | DFATYYCQQ | | | | | | |
| | PYYYIMDVWG | YKSYPVTFG | | | | | | |
| | KGTTVTVSS | QGTKVEIK | | | | | | |
| | (SEQ ID | (SEQ ID | | | | | | |
| | NO: 1396) | NO: 1367) | | | | | | |
| MIAB188 | EVQLLESGGG | DIQMTQSPS | FTFSD | SAISG | CARDR | RASQS | SSLQS | QQYKS |
| | LVQPGGSLRL | SLSASVGDR | FWMH | SGGST | PYYYI | ISRSL | (SEQ | YPVT |
| | SCAASGFTES | VTITCRASQ | (SEQ | YYA | MDVW | A | ID | (SEQ |
| | DFWMHWVRQA | SISRSLAWY | ID | (SEQ | (SEQ | (SEQ | NO: | ID |
| | PGKGLEWVSA | QQKPGKAPK | NO: | ID | ID | ID | 362) | NO: |
| | ISGSGGSTYY | LLIYAASSL | 359) | NO: | NO: | NO: | | 363) |
| | ADSVKGRFTI | QSGVPSRFS | | 103) | 1431) | 1408) | | |
| | SRDNSKNTLY | GSGSGTDFT | | | | | | |
| | LQMNSLRAED | LTISSLQPE | | | | | | |
| | TAVYYCARDR | DFATYYCQQ | | | | | | |
| | PYYYIMDVWG | YKSYPVTFG | | | | | | |
| | KGTTVTVSS | QGTKVEIK | | | | | | |
| | (SEQ ID | (SEQ ID | | | | | | |
| | NO: 1397) | NO: 1363) | | | | | | |
| MIAB189 | EVQLLESGGG | DIQMTQSPS | FTFSD | SAISG | CARDR | RASQS | SSLQS | QQYKS |
| | LVQPGGSLRL | SLSASVGDR | FWMH | SGGST | PYYYI | VSSSL | (SEQ | YPVT |
| | SCAASGFTES | VTITCRASQ | (SEQ | YYA | MDVW | A | ID | (SEQ |
| | DFWMHWVRQA | SVSSSLAWY | ID | (SEQ | (SEQ | (SEQ | NO: | ID |
| | PGKGLEWVSA | QQKPGKAPK | NO: | ID | ID | ID | 362) | NO: |
| | ISGSGGSTYY | LLIYAASSL | 359) | NO: | NO: | NO: | | 363) |
| | ADSVKGRFTI | QSGVPSRES | | 103) | 1431) | 1409) | | |
| | SRDNSKNTLY | GSGSGTDFT | | | | | | |
| | LQMNSLRAED | LTISSLQPE | | | | | | |
| | TAVYYCARDR | DFATYYCQQ | | | | | | |
| | PYYYIMDVWG | YKSYPVTFG | | | | | | |
| | KGTTVTVSS | QGTKVEIK | | | | | | |
| | (SEQ ID | (SEQ ID | | | | | | |
| | NO: 1397) | NO: 1364) | | | | | | |
| MIAB190 | EVQLLESGGG | DIQMTQSPS | FTFSD | SAISG | CARDR | RASQS | SSLQS | QQYKS |
| | LVQPGGSLRL | SLSASVGDR | FWMH | SGGST | PYYYI | ISSSL | (SEQ | YPVT |
| | SCAASGFTFS | VTITCRASQ | (SEQ | YYA | MDVW | A | ID | (SEQ |
| | DFWMHWVRQA | SISSSLAWY | ID | (SEQ | (SEQ | (SEQ | NO: | ID |
| | PGKGLEWVSA | QQKPGKAPK | NO: | ID | ID | ID | 362) | NO: |
| | ISGSGGSTYY | LLIYAASSL | 359) | NO: | NO: | NO: | | 363) |
| | ADSVKGRFTI | QSGVPSRFS | | 103) | 1431) | 1412) | | |
| | SRDNSKNTLY | GSGSGTDFT | | | | | | |
| | LQMNSLRAED | LTISSLQPE | | | | | | |
| | TAVYYCARDR | DFATYYCQQ | | | | | | |
| | PYYYIMDVWG | YKSYPVTFG | | | | | | |
| | KGTTVTVSS | QGTKVEIK | | | | | | |
| | (SEQ ID | (SEQ ID | | | | | | |
| | NO: 1397) | NO: 1367) | | | | | | |
| MIAB191 | EVQLLESGGG | DIQMTQSPS | FTFSS | SAISG | CARDR | RASQS | SSLQS | QQYKS |
| | LVQPGGSLRL | SLSASVGDR | YWMH | SGGST | PYYYI | ISRSL | (SEQ | YPVT |
| | SCAASGFTFS | VTITCRASQ | (SEQ | YYA | MDVW | A | ID | (SEQ |
| | SYWMHWVRQA | SISRSLAWY | ID | (SEQ | (SEQ | (SEQ | NO: | ID |
| | PGKGLEWVSA | QQKPGKAPK | NO: | ID | ID | ID | 362) | NO: |
| | ISGSGGSTYY | LLIYAASSL | 83) | NO: | NO: | NO: | | 363) |
| | ADSVKGRFTI | QSGVPSRFS | | 103) | 1431) | 1408) | | |
| | SRDNSKNTLY | GSGSGTDFT | | | | | | |
| | LQMNSLRAED | LTISSLQPE | | | | | | |
| | TAVYYCARDR | DFATYYCQQ | | | | | | |
| | PYYYIMDVWG | YKSYPVTFG | | | | | | |
| | KGTTVTVSS | QGTKVEIK | | | | | | |
| | (SEQ ID | (SEQ ID | | | | | | |
| | NO: 1398) | NO: 1363) | | | | | | |
| MIAB192 | EVQLLESGGG | DIQMTQSPS | FTFSS | SAISG | CARDR | RASQS | SSLQS | QQYKS |
| | LVQPGGSLRL | SLSASVGDR | YWMH | SGGST | PYYYI | VSSSL | (SEQ | YPVT |
| | SCAASGFTFS | VTITCRASQ | (SEQ | YYA | MDVW | A | ID | (SEQ |
| | SYWMHWVRQA | SVSSSLAWY | ID | (SEQ | (SEQ | (SEQ | NO: | ID |
| | PGKGLEWVSA | QQKPGKAPK | NO: | ID | ID | ID | 362) | NO: |
| | ISGSGGSTYY | LLIYAASSL | 83) | NO: | NO: | NO: | | 363) |
| | ADSVKGRFTI | QSGVPSRES | | 103) | 1431) | 1409) | | |
| | SRDNSKNTLY | GSGSGTDFT | | | | | | |
| | LQMNSLRAED | LTISSLQPE | | | | | | |
| | TAVYYCARDR | DFATYYCQQ | | | | | | |
| | PYYYIMDVWG | YKSYPVTFG | | | | | | |
| | KGTTVTVSS | QGTKVEIK | | | | | | |
| | (SEQ ID | (SEQ ID | | | | | | |
| | NO: 1398) | NO: 1364) | | | | | | |
| MIAB193 | EVQLLESGGG | DIQMTQSPS | FTFSS | SAISG | CARDR | RASQS | SSLQS | QQYKS |
| | LVQPGGSLRL | SLSASVGDR | YWMH | SGGST | PYYYI | ISSSL | (SEQ | YPVT |
| | SCAASGFTFS | VTITCRASQ | (SEQ | YYA | MDVW | A | ID | (SEQ |
| | SYWMHWVRQA | SISSSLAWY | ID | (SEQ | (SEQ | (SEQ | NO: | ID |
| | PGKGLEWVSA | QQKPGKAPK | NO: | ID | ID | ID | 362) | NO: |
| | ISGSGGSTYY | LLIYAASSL | 83) | NO: | NO: | NO: | | 363) |
| | ADSVKGRFTI | QSGVPSRES | | 103) | 1431) | 1412) | | |
| | SRDNSKNTLY | GSGSGTDFT | | | | | | |
| | LQMNSLRAED | LTISSLQPE | | | | | | |
| | TAVYYCARDR | DFATYYCQQ | | | | | | |
| | PYYYIMDVWG | YKSYPVTFG | | | | | | |
| | KGTTVTVSS | QGTKVEIK | | | | | | |
| | (SEQ ID | (SEQ ID | | | | | | |
| | NO: 1398) | NO: 1367) | | | | | | |
| MIAB194 | EVQLLESGGG | DIQMTQSPS | FTFSD | SYISG | CARDR | RASQS | SSLQS | QQYKS |
| | LVQPGGSLRL | SLSASVGDR | FWMH | DSGYT | PYYYI | ISRSL | (SEQ | YPVT |
| | SCAASGFTFS | VTITCRASQ | (SEQ | NYA | MDVW | A | ID | (SEQ |
| | DFWMHWVRQA | SISRSLAWY | ID | (SEQ | (SEQ | (SEQ | NO: | ID |
| | PGKGLEWISY | QQKPGKAPK | NO: | ID | ID | ID | 362) | NO: |
| | ISGDSGYTNY | LLIYAASSL | 359) | NO: | NO: | NO: | | 363) |
| | ADSVKGRFTI | QSGVPSRFS | | 170) | 1431) | 1408) | | |
| | SRDNSKNTLY | GSGSGTDFT | | | | | | |
| | LQMNSLRAED | LTISSLQPE | | | | | | |
| | TAVYYCARDR | DFATYYCQQ | | | | | | |
| | PYYYIMDVWG | YKSYPVTFG | | | | | | |
| | KGTTVTVSS | QGTKVEIK | | | | | | |
| | (SEQ ID | (SEQ ID | | | | | | |
| | NO: 1387) | NO: 1363) | | | | | | |
| MIAB195 | EVQLLESGGG | DIQMTQSPS | FTFSI | SYISG | CARDR | RASQS | SSLQS | QQYKS |
| | LVQPGGSLRL | SLSASVGDR | FWMH | DSGYT | PYYYI | VSSSL | (SEQ | YPVT |
| | SCAASGFTFS | VTITCRASQ | (SEQ | NYA | MDVW | A | ID | (SEQ |
| | DFWMHWVRQA | SVSSSLAWY | ID | (SEQ | (SEQ | (SEQ | NO: | ID |
| | PGKGLEWISY | QQKPGKAPK | NO: | ID | ID | ID | 362) | NO: |
| | ISGDSGYTNY | LLIYAASSL | 359) | NO: | NO: | NO: | | 363) |
| | ADSVKGRFTI | QSGVPSRES | | 170) | 1431) | 1409) | | |
| | SRDNSKNTLY | GSGSGTDFT | | | | | | |
| | LQMNSLRAED | LTISSLQPE | | | | | | |
| | TAVYYCARDR | DFATYYCQQ | | | | | | |
| | PYYYIMDVWG | YKSYPVTFG | | | | | | |
| | KGTTVTVSS | QGTKVEIK | | | | | | |
| | (SEQ ID | (SEQ ID | | | | | | |
| | NO: 1387) | NO: 1364) | | | | | | |
| MIAB196 | EVQLLESGGG | DIQMTQSPS | FTFSD | SYISG | CARDR | RASQS | SSLQS | QQYKS |
| | LVQPGGSLRL | SLSASVGDR | FWMH | DSGYT | PYYYI | ISSSL | (SEQ | YPVT |
| | SCAASGFTES | VTITCRASQ | (SEQ | NYA | MDVW | A | ID | (SEQ |
| | DFWMHWVRQA | SISSSLAWY | ID | (SEQ | (SEQ | (SEQ | NO: | ID |
| | PGKGLEWISY | QQKPGKAPK | NO: | ID | ID | ID | 362) | NO: |
| | ISGDSGYTNY | LLIYAASSL | 359) | NO: | NO: | NO: | | 363) |
| | ADSVKGRFTI | QSGVPSRES | | 170) | 1431) | 1412) | | |
| | SRDNSKNTLY | GSGSGTDET | | | | | | |
| | LQMNSLRAED | LTISSLQPE | | | | | | |
| | TAVYYCARDR | DFATYYCQQ | | | | | | |
| | PYYYIMDVWG | YKSYPVTFG | | | | | | |
| | KGTTVTVSS | QGTKVEIK | | | | | | |
| | (SEQ ID | (SEQ ID | | | | | | |
| | NO: 1387) | NO: 1367) | | | | | | |
| MIAB197 | EVQLLESGGG | DIQMTQSPS | FTFSD | SYISG | CARDR | RASQS | SSLQS | QQYKS |
| | LVQPGGSLRL | SLSASVGDR | FWMH | DSGYT | PYYYI | ISRSL | (SEQ | YPVT |
| | SCAASGFTES | VTITCRASQ | (SEQ | NYA | MDVW | A | ID | (SEQ |
| | DFWMHWVRQA | SISRSLAWY | ID | (SEQ | (SEQ | (SEQ | NO: | ID |
| | PGKGLEWISY | QQKPGKAPK | NO: | ID | ID | ID | 362) | NO: |
| | ISGDSGYTNY | LLIYAASSL | 359) | NO: | NO: | NO: | | 363) |
| | ADSVKGRFTI | QSGVPSRES | | 170) | 1431) | 1408) | | |
| | SRDNSKNTLY | GSGSGTDFT | | | | | | |
| | LQMNSLRAED | LTISSLQPE | | | | | | |
| | TAVYYCARDR | DFATYYCQQ | | | | | | |
| | PYYYIMDVWG | YKSYPVTFG | | | | | | |
| | KGTTVTVSS | QGTKVEIK | | | | | | |
| | (SEQ ID | (SEQ ID | | | | | | |
| | NO: 1387) | NO: 1363) | | | | | | |
| MIAB198 | EVQLLESGGG | DIQMTQSPS | FTFSD | SYISG | CARDR | RASQS | SSLQS | QQYKS |
| | LVQPGGSLRL | SLSASVGDR | FWMH | DSGYT | PYYYI | VSRSL | (SEQ | YPVT |
| | SCAASGFTFS | VTITCRASQ | (SEQ | NYA | MDVW | A | ID | (SEQ |
| | DFWMHWVRQA | SVSRSLAWY | ID | (SEQ | (SEQ | (SEQ | NO: | ID |
| | PGKGLEWISY | QQKPGKAPK | NO: | ID | ID | ID | 362) | NO: |
| | ISGDSGYTNY | LLIYAASSL | 359) | NO: | NO: | NO: | | 363) |
| | ADSVKGRFTI | QSGVPSRES | | 170) | 1431) | 361) | | |
| | SRDNSKNTLY | GSGSGTDFT | | | | | | |
| | LQMNSLRAED | LTISSLQPE | | | | | | |
| | TAVYYCARDR | DFATYYCQQ | | | | | | |
| | PYYYIMDVWG | YKSYPVTFG | | | | | | |
| | KGTTVTVSS | QGTKVEIK | | | | | | |
| | (SEQ ID | (SEQ ID | | | | | | |
| | NO: 1387) | NO: 592) | | | | | | |

[0354] In some embodiments, the MAdCAM antibody comprises one or more sequences, or a combination thereof, of the sequences presented in Table 9.

[0355] In some embodiments, the antibody is linked to another antibody or therapeutic. In some embodiments, the MAdCAM antibody is linked to a PD-1 antibody or an IL-2 mutein as provided herein or that is incorporated by reference.

[0356] In some embodiments, the variable light chain MAdCAM antibody comprises a mutation selected from the group comprising V29I; R31S; S32Y; A34N; Y91S; K92Y; Y94T; and V99R.

[0357] In some embodiments, the variable heavy chain MAdCAM antibody comprises a mutation selected from the group comprising D31S, F32Y, I48V, Y50A, D54S, Y57S, N59Y, Y103G, V29I, R31S; D31S, F32Y, I48V, Y50A, D54S, Y57S, N59Y, V29I, R31S; D31S, F32Y, I48V, Y50A, D54S, Y57S, N59Y, Y103G, V29I; D31S, F32Y, I48V, Y50A, D54S, Y57S, N59Y, V29I; D31S, F32Y, Y50A, D54S, S55G, Y57S, N59Y, Y103G, V29I, R31S; D31S, F32Y, Y50A, D54S, S55G, Y57S, N59Y, V29I, R31S; D31S, F32Y, Y50A, D54S, S55G, Y57S, N59Y, Y103G, V29I; D31S, F32Y, Y50A, D54S, S55G, Y57S, N59Y, V29I; D31S, F32Y, I48V, Y50A, D54S, S55G, Y57S, N59Y, Y103G, V29I, R31S; D31S, F32Y, I48V, Y50A, D54S, S55G, Y57S, N59Y, V29I, R31S; D31S, F32Y, I48V, Y50A, D54S, S55G, Y57S, N59Y, Y103G, V29I; D31S, F32Y, I48V, Y50A, D54S, S55G, Y57S, N59Y, V29I; D31S, F32Y, I48V, D54S, S55G, Y103G, V29I, R31S; D31S, F32Y, I48V, Y50A, D54S, S55G, Y57S, N59Y, Y105D, V29I, R31S; D31S, F32Y, I48V, D54S, S55G, Y105D, V29I, R31S; D31S, F32Y, I48V, Y50A, D54S, S55G, Y57S, N59Y, Y103G, V29I, R31S; D31S, F32Y, I48V, D54S, S55G, Y105D, V29I, R31S; D31S; F32Y; W33A; H35S; I48V; Y50A; D54S; S55G; Y57S; N59Y; D60A; D60Q; N72A; N72Q; N82A; N82G; and N82Q.

[0358] In some embodiments, the MAdCAM antibody comprises one or more sequences as shown in Table 6 or Table 9. In some embodiments, the MAdCAM antibody comprises a combination of one or more sequence as shown in Table 6, or Table 9. In some embodiments, the MAdCAM antibody is in a scFV format as illustrated in Table 6. In some embodiments, the antibody comprises a CDR1 from any one of clones 1-66 of Table 6, a CDR2 from any one of clones 1-84, and a CDR3 from any one of clones 1-66 of Table 6. In some embodiments, the antibody comprises a LCDR1 from any one of clones 1-66 of Table 6, a LCDR2 from any one of clones 1-66 of Table 6, and a LCDR3 from any one of clones 1-66 of Table 6. In some embodiments, the MAdCAM antibody is in a Fab format as illustrated in Table 9. In some embodiments, the antibody comprises a HCDR1 from any one of clones MIAB128-198 of Table 9, a HCDR2 from any one of clones MIAB128-198 of Table 9, and a HCDR3 from any one of clones MIAB128-198 of Table 9. In some embodiments, the antibody comprises a LCDR1 from any one of clones MIAB128-198 of Table 9, a LCDR2 from any one of clones MIAB128-198 of Table 9, and a LCDR3 from any one of clones MIAB128-198 of Table 9. In some embodiments, the amino acid residues of the CDRs shown above contain mutations. In some embodiments, the CDRs contain 0, 1, 2, 3, 4, 5, 6, 7, 8, 9, or 10 substitutions or mutations. In some embodiments, the substitution is a conservative substitution.

[0359] In some embodiments, the MAdCAM antibody has a VH region selected from any one of clones 1-84 of Table 7 and a VL region selected from any one of clones 1-84 as set forth in of Table 7. In some embodiments, the antibody comprises a CDR1 from any one of clones 1-84 of Table 7, a CDR2 from any one of clones 1-84, and a CDR3 from any one of clones 1-84 of Table 7. In some embodiments, the antibody comprises a LCDR1 from any one of clones 1-84 of Table 7, a LCDR2 from any one of clones 1-84 of Table 7, and a LCDR3 from any one of clones 1-84 of Table 7. In some embodiments, the MAdCAM antibody has a VH region selected from any one of clones MIAB128-198 of Table 9 and a VK region selected from any one of clones MIAB128-198 as set forth in of Table 9. In some embodiments, the antibody comprises a CDR1 from any one of clones MIAB128-198 of Table 9, a CDR2 from any one of clones MIAB128-198, and a CDR3 from any one of clones MIAB128-198 of Table 9. In some embodiments, the antibody comprises a LCDR1 from any one of clones MIAB128-198 of Table 9, a LCDR2 from any one of clones MIAB128-198 of Table 9, and a LCDR3 from any one of clones MIAB128-198 of Table 9.

[0360] In some embodiments, the amino acid residues of the CDRs shown above contain mutations. In some embodiments, the CDRs contain 0, 1, 2, 3, 4, 5, 6, 7, 8, 9, or 10 substitutions or mutations. In some embodiments, the substitution is a conservative substitution.

[0361] In some embodiments, the molecule comprises an antibody that binds to MAdCAM. In some embodiments, the antibody comprises (i) a heavy chain variable region comprising heavy chain CDR1, CDR2, and CDR3 sequences, wherein the heavy chain CDR1 sequence has the amino acid sequence of any of the CDR1 sequences set forth in Table 6, Table 7, or Table 9; the heavy chain CDR2 has the amino acid sequence of any of the CDR2 sequences set forth in Table 6, Table 7, or Table 9, and the heavy chain CDR3 has the amino acid sequence of any of the CDR3 sequences set forth in Table 6, Table 7, or Table 9; or variants of any of the foregoing; and (ii) a light chain variable region comprising light chain CDR1, CDR2, and CDR3 sequences, wherein the light chain CDR1 sequence has the amino acid sequence of any of the LCDR1 sequences set forth in Table 6, Table 7, or Table 9; the light chain LCDR2 has the amino acid sequence of any of the LCDR2 sequences set forth in Table 6, Table 7, or Table 9, and the light chain CDR3 has the amino acid sequence of any of the LCDR3 sequences set forth in Table 6, Table 7, or Table 9, or variants of any of the foregoing.

[0362] In some embodiments, the antibody comprises a heavy chain variable region comprising heavy chain CDR1, CDR2, and CDR3 sequences, wherein the heavy chain CDR1, CDR2, and CDR3 sequences have the amino acid sequence as set forth in Antibody 6 of Table 6 or Antibody 6 of Table 7, or variants of any of the foregoing; and (ii) a light chain variable region comprising light chain CDR1, CDR2, and CDR3 sequences, wherein the light chain CDR1, CDR2, and CDR3 sequences have the amino acid sequence as set forth sequence as set forth in Antibody 6 of Table 6 or Antibody 6 of Table 7, or variants of any of the foregoing.

[0363] In some embodiments, the antibody comprises a heavy chain variable region comprising heavy chain CDR1, CDR2, and CDR3 sequences, wherein the heavy chain CDR1, CDR2, and CDR3 sequences have the amino acid sequence as set forth in Antibody 59 of Table 6 or Antibody 75 of Table 7, or variants of any of the foregoing; and (ii) a light chain variable region comprising light chain CDR1, CDR2, and CDR3 sequences, wherein the light chain CDR1, CDR2, and CDR3 sequences have the amino acid sequence as set forth sequence as set forth in Antibody 59 of Table 6 or Antibody 75 of Table 7, or variants of any of the foregoing.

[0364] In some embodiments, the antibody comprises a heavy chain variable region comprising heavy chain CDR1, CDR2, and CDR3 sequences, wherein the heavy chain CDR1, CDR2, and CDR3 sequences have the amino acid sequence as set forth in Antibody 63 of Table 6 or Antibody 79 of Table 7, or variants of any of the foregoing; and (ii) a light chain variable region comprising light chain CDR1, CDR2, and CDR3 sequences, wherein the light chain CDR1, CDR2, and CDR3 sequences have the amino acid sequence as set forth sequence as set forth in Antibody 63 of Table 6 or Antibody 79 of Table 7, or variants of any of the foregoing.

[0365] In some embodiments, the antibody comprises a heavy chain variable region comprising heavy chain CDR1, CDR2, and CDR3 sequences, wherein the heavy chain CDR1, CDR2, and CDR3 sequences have the amino acid sequence as set forth in MIAB197 of Table 9, or variants of any of the foregoing; and (ii) a light chain variable region comprising light chain CDR1, CDR2, and CDR3 sequences, wherein the light chain CDR1, CDR2, and CDR3 sequences have the amino acid sequence as set forth sequence as set forth in MIAB197 of Table 9, or variants of any of the foregoing.

[0366] These are non-limiting illustrative examples and the antibodies can have the CDRs as set forth in the tables provided herein and are explicitly referenced without writing out the previous paragraphs for each CDR set.

[0367] In some embodiments, the MAdCAM antibody comprises a VH and VL(VK) chain as provided herein, such as those listed in the Table 7, MAdCAM Antibody CDR Table 1, and Table 9. In some embodiments, the VH peptide comprises a sequence of SEQ ID NO: 414, 59I, 599, or 1387. In some embodiments, the VK chain comprises a sequence of 415, 592, 600, or 1363. In some embodiments, the antibody comprises a VH of SEQ ID NO: 414 and a VK of SEQ ID NO: 415. In some embodiments, the antibody comprises a VH of SEQ ID NO: 591 and a VK of SEQ ID NO: 592. In some embodiments, the antibody comprises a VH of SEQ ID NO: 599 and a VK of SEQ ID NO: 600. In some embodiments, the antibody comprises a VH of SEQ ID NO: 1387 and a VK of SEQ ID NO: 1363. The VH and VK can also be in a scFV format as illustrated in the Table 6, Table 11, Table 12, and Table 14. The VH and VK can also be in a Fab format as illustrated in the Table 9.

[0368] In some embodiments, a therapeutic is provided comprising one or more of the following polypeptides:

| SEQ ID NO: | Sequence |
|---|---|
| 620 | EVQLLESGGGLVQPGGSLRLSCAASGFTFNNYAFHWVRQAPGKGLEWVSRINSYGTSTTYADSVKGRF |
| | TISRDNSKNTLYLQMNSLRAEDTAVYYCAREGPVAGYWYFDLWGQGTLVTVSSASTKGPSVFPLAPSS |
| | KSTSGGTAALGCLVKDYFPEPVTVSWNSGALTSGVHTFPAVLQSSGLYSLSSVVTVPSSSLGTQTYIC |
| | NVNHKPSNTKVDKKVEPKSCDKTHTCPPCPAPEAAGAPSVFLFPPKPKDTLMISRTPEVTCVVVDVSH |
| | EDPEVKFNWYVDGVEVHNAKTKPREEQYNSTYRVVSVLTVLHQDWLNGKEYKCKVSNKALPAPIEKTI |
| | SKAKGQPREPQVYTLPPSREEMTKNQVSLTCLVKGFYPSDIAVEWESNGQPENNYKTTPPVLDSDGSF |
| | FLYSKLTVDKSRWQQGNVFSCSVMHEALHNHYTQKSLSLSPGGGGGSAPTSSSTKKTQLQLEHLLLDL |
| | QMILNGINNYKNPKLTRMLTFKFYMPKKATELKHLQCLEEELKPLEEALNLAPSKNFHLRPRDLISDI |
| | NVIVLELKGSETTFMCEYADETATIVEFINRWITFSQSIISTLT |
| 621 | DIQMTQSPSSLSASVGDRVTITCRASQIIGTNLAWYQQKPGKAPKLLIYGASSLQSGVPSRFSGSGSG |
| | TDFTLTISSLQPEDFATYYCQQSYRLPFTFGQGTKVEIKRRTVAAPSVFIFPPSDEQLKSGTASVVCL |
| | LNNFYPREAKVOWKVDNALQSGNSQESVTEQDSKDSTYSLSSTLTLSKADYEKHKVYACEVTHQGLSS |
| | PVTKSENRGEC |
| 622 | EVQLLESGGGLVQPGGSLRLSCAASGFTFSDFWMHWVRQAPGKGLEWISYISGDSGYTNYADSVKGRF |
| | TISRDNSKNTLYLQMNSLRAEDTAVYYCARDRPYYYYMDVWGKGTTVTVSSASTKGPSVFPLAPSSKS |
| | TSGGTAALGCLVKDYFPEPVTVSWNSGALTSGVHTFPAVLQSSGLYSLSSVVTVPSSSLGTQTYICNV |
| | NHKPSNTKVDKKVEPKSCDKTHTCPPCPAPEAAGAPSVFLFPPKPKDTLMISRTPEVTCVVVDVSHED |
| | PEVKFNWYVDGVEVHNAKTKPREEQYNSTYRVVSVLTVLHQDWLNGKEYKCKVSNKALPAPIEKTISK |
| | AKGQPREPQVYTLPPSREEMTKNQVSLTCLVKGFYPSDIAVEWESNGQPENNYKTTPPVLDSDGSFFL |
| | YSKLTVDKSRWQQGNVFSCSVMHEALHNHYTQKSLSLSPGGGGGSAPTSSSTKKTQLQLEHLLLDLQM |
| | ILNGINNYKNPKLTRMLTFKFYMPKKATELKHLQCLEEELKPLEEALNLAPSKNFHLRPRDLISDINV |
| | IVLELKGSETTFMCEYADETATIVEFINRWITFSQSIISTLT |
| 623 | DIQMTQSPSSLSASVGDRVTITCRASQSVSRSLAWYQQKPGKAPKLLIYAASSLQSGVPSRFSGSGSG |
| | TDFTLTISSLQPEDFATYYCQQYKSYPVTFGQGTKVEIKRTVAAPSVFIFPPSDEQLKSGTASVVCLL |
| | NNFYPREAKVQWKVDNALQSGNSQESVTEQDSKDSTYSLSSTLTLSKADYEKHKVYACEVTHQGLSSP |
| | VTKSENRGEC |
| 624 | EVQLLESGGGLVKPGGSLRLSCAASGFTFDDYAMHWVRQAPGKGLEWVASITSSSAFIDYAASVKGRF |
| | TISRDDSKNTLYLQMNSLKTEDTAVYYCARERVDWNSYFDLWGRGTLVTVSSASTKGPSVFPLAPSSK |
| | STSGGTAALGCLVKDYFPEPVTVSWNSGALTSGVHTFPAVLQSSGLYSLSSVVTVPSSSLGTQTYICN |
| | VNHKPSNTKVDKKVEPKSCDKTHTCPPCPAPEAAGAPSVELFPPKPKDTLMISRTPEVTCVVVDVSHE |
| | DPEVKFNWYVDGVEVHNAKTKPREEQYNSTYRVVSVLTVLHQDWLNGKEYKCKVSNKALPAPIEKTIS |
| | KAKGQPREPQVYTLPPSREEMTKNQVSLTCLVKGFYPSDIAVEWESNGQPENNYKTTPPVLDSDGSFF |
| | LYSKLTVDKSRWQQGNVFSCSVMHEALHNHYTQKSLSLSPGGGGGSAPTSSSTKKTQLQLEHLLLDLQ |
| | MILNGINNYKNPKLTRMLTFKFYMPKKATELKHLQCLEEELKPLEEALNLAPSKNFHLRPRDLISDIN |
| | VIVLELKGSETTFMCEYADETATIVEFINRWITFSQSIISTLT |
| 625 | EIVMTQSPATLSVSPGERATLSCRASQGISNSYLAWYQQKPGQAPRLLIYGASTRATGIPARFSGSGS |
| | GTEFTLTISSLQSEDFAVYYCQQYYTYPPTFGPGTKVDIKRTVAAPSVFIFPPSDEQLKSGTASVVCL |
| | LNNFYPREAKVQWKVDNALQSGNSQESVTEQDSKDSTYSLSSTLTLSKADYEKHKVYACEVTHQGLSS |
| | PVTKSENRGEC |

[0369] In some embodiments, the polypeptide comprises one peptide of SEQ ID NO: 620, 622, or 624 and a second peptide of SEQ ID NO: 621, 623, or 625. In some embodiments, a polypeptide is provided comprising a first peptide of SEQ ID NO: 620 and a second peptide comprising a sequence of SEQ ID NO: 621. In some embodiments, a polypeptide is provided comprising a first peptide of SEQ ID NO: 620 and a second peptide comprising a sequence of SEQ ID NO: 623. In some embodiments, a polypeptide is provided comprising a first peptide of SEQ ID NO: 620 and a second peptide comprising a sequence of SEQ ID NO: 625. In some embodiments, a polypeptide is provided comprising a first peptide of SEQ ID NO: 622 and a second peptide comprising a sequence of SEQ ID NO: 621. In some embodiments, a polypeptide is provided comprising a first peptide of SEQ ID NO: 622 and a second peptide comprising a sequence of SEQ ID NO: 623. In some embodiments, a polypeptide is provided comprising a first peptide of SEQ ID NO: 622 and a second peptide comprising a sequence of SEQ ID NO: 625. In some embodiments, a polypeptide is provided comprising a first peptide of SEQ ID NO: 624 and a second peptide comprising a sequence of SEQ ID NO: 621. In some embodiments, a polypeptide is provided comprising a first peptide of SEQ ID NO: 624 and a second peptide comprising a sequence of SEQ ID NO: 623. In some embodiments, a polypeptide is provided comprising a first peptide of SEQ ID NO: 624 and a second peptide comprising a sequence of SEQ ID NO: 625.

[0370] In some embodiments, the therapeutic compound comprises a MAdCAM IgG wherein the IL-2 mutein is fused to the C-terminus of the IgG heavy chain, and is selected from one or more of the following sequences:

TABLE 10

| | | | Fc-IL- | | | |
|---|---|---|---|---|---|---|
| | | | 2M | | | |
| | | IgG1 Constant | Linker | | | |
| Ab | VH Seq | Domains Seq | Seq | IL-2M Seq | VK Seq | CK Seq |
| MIAB | EVQLLESG | ASTKGPSVFPLAPSSKSTSG | GGGGS | APTSSSTKKT | DIQMTQS | RTVAAPS |
| 128 | GGLVQPGG | GTAALGCLVKDYFPEPVTVS | (SEQ | QLQLEHLLLD | PSSLSAS | VFIFPPS |
| | SLRLSCAA | WNSGALTSGVHTFPAVLQSS | ID NO: | LQMILNGINN | VGDRVTI | DEQLKSG |
| | SGFTFSDF | GLYSLSSVVTVPSSSLGTQT | 23) | YKNPKLTRML | TCRASQS | TASVVCL |
| | WMHWVRQA | YICNVNHKPSNTKVDKKVEP | | TFKFYMPKKA | VSRSLAW | LNNFYPR |
| | PGKGLEWI | KSCDKTHTCPPCPAPEAAGA | | TELKHLQCLE | YQQKPGK | EAKVQWK |
| | SYISGDSG | PSVFLFPPKPKDTLMISRTP | | EELKPLEEAL | APKLLIY | VDNALQS |
| | YTNYADSV | EVTCVVVDVSHEDPEVKENW | | NLAPSKNFHL | AASSLQS | GNSQESV |
| | KGRFTISR | YVDGVEVHNAKTKPREEQYN | | RPRDLISDIN | GVPSRFS | TEQDSKD |
| | DNSKNTLY | STYRVVSVLTVLHQDWLNGK | | VIVLELKGSE | GSGSGTD | STYSLSS |
| | LQMNSLRA | EYKCKVSNKALPAPIEKTIS | | TTFMCEYADE | FTLTISS | TLTLSKA |
| | EDTAVYYC | KAKGQPREPQVYTLPPSREE | | TATIVEFINR | LQPEDFA | DYEKHKV |
| | ARDRPNYY | MTKNQVSLTCLVKGFYPSDI | | WITFSQSIIS | TYYCQQY | YACEVTH |
| | YMDVWGKG | AVEWESNGQPENNYKTTPPV | | TLT (SEQ | KSYPVTF | QGLSSPV |
| | TTVTVSS | LDSDGSFFLYSKLTVDKSRW | | ID NO: 41) | GQGTKVE | TKSFNRG |
| | (SEQ ID | QQGNVFSCSVMHEALHNHYT | | | IK (SEQ | EC (SEQ |
| | NO: | QKSLSLSPG (SEQ ID | | | ID NO: | ID NO: |
| | 1346) | NO: 44) | | | 592) | 45) |
| MIAB | EVQLLESG | ASTKGPSVFPLAPSSKSTSG | GGGGS | APTSSSTKKT | DIQMTQS | RTVAAPS |
| 128A | GGLVQPGG | GTAALGCLVKDYFPEPVTVS | (SEQ | QLQLEHLLLD | PSSLSAS | VFIFPPS |
| | SLRLSCAA | WNSGALTSGVHTFPAVLQSS | ID NO: | LQMILNGINN | VGDRVTI | DEQLKSG |
| | SGFTFSDF | GLYSLSSVVTVPSSSLGTQT | 23) | YKNPKLTRML | TCRASQS | TASVVCL |
| | WMHWVRQA | YICNVNHKPSNTKVDKKVEP | | TFKFYMPKKA | VSRSLAW | LNNFYPR |
| | PGKGLEWI | KSCDKTHTCPPCPAPEAAGA | | TELKHLQCLE | YQQKPGK | EAKVQWK |
| | SYISGDSG | PSVFLFPPKPKDTLMISRTP | | EELKPLEEAL | APKLLIY | VDNALQS |
| | YTNYADSV | EVTCVVVDVSHEDPEVKENW | | NLAPSKNFHL | AASSLQS | GNSQESV |
| | KGRFTISR | YVDGVEVHNAKTKPREEQYN | | RPRDLISDIN | GVPSRFS | TEQDSKD |
| | DNSKNTLY | STYRVVSVLTVLHQDWLNGK | | VIVLELKGSE | GSGSGTD | STYSLSS |
| | LQMNSLRA | EYKCKVSNKALPAPIEKTIS | | TTFMCEYADE | FTLTISS | TLTLSKA |
| | EDTAVYYC | KAKGQPREPQVYTLPPSREE | | TATIVEFINR | LQPEDFA | DYEKHKV |
| | ARDRPQYY | MTKNQVSLTCLVKGFYPSDI | | WITFSQSIIS | TYYCQQY | YACEVTH |
| | YMDVWGKG | AVEWESNGQPENNYKTTPPV | | TLT (SEQ | KSYPVTF | QGLSSPV |
| | TTVTVSS | LDSDGSFFLYSKLTVDKSRW | | ID NO: 41) | GQGTKVE | TKSFNRG |
| | (SEQ ID | QQGNVFSCSVMHEALHNHYT | | | IK (SEQ | EC (SEQ |
| | NO: | QKSLSLSPG (SEQ ID | | | ID NO: | ID NO: |
| | 1348) | NO: 44) | | | 592) | 45) |
| MIAB | EVQLLESG | ASTKGPSVFPLAPSSKSTSG | GGGGS | APTSSSTKKT | DIQMTQS | RTVAAPS |
| 129 | GGLVQPGG | GTAALGCLVKDYFPEPVTVS | (SEQ | QLQLEHLLLD | PSSLSAS | VFIFPPS |
| | SLRLSCAA | WNSGALTSGVHTFPAVLQSS | ID NO: | LQMILNGINN | VGDRVTI | DEQLKSG |
| | SGFTFSDF | GLYSLSSVVTVPSSSLGTQT | 23) | YKNPKLTRML | TCRASQS | TASVVCL |
| | WMHWVRQA | YICNVNHKPSNTKVDKKVEP | | TFKFYMPKKA | VSRSLAW | LNNFYPR |
| | PGKGLEWI | KSCDKTHTCPPCPAPEAAGA | | TELKHLQCLE | YQQKPGK | EAKVQWK |
| | SYISGDSG | PSVFLFPPKPKDTLMISRTP | | EELKPLEEAL | APKLLIY | VDNALQS |
| | YTNYADSV | EVTCVVVDVSHEDPEVKENW | | NLAPSKNFHL | AASSLQS | GNSQESV |
| | KGRFTISR | YVDGVEVHNAKTKPREEQYN | | RPRDLISDIN | GVPSRFS | TEQDSKD |
| | DNSKNTLY | STYRVVSVLTVLHQDWLNGK | | VIVLELKGSE | GSGSGTD | STYSLSS |
| | LQMNSLRA | EYKCKVSNKALPAPIEKTIS | | TTFMCEYADE | FTLTISS | TLTLSKA |
| | EDTAVYYC | KAKGQPREPQVYTLPPSREE | | TATIVEFINR | LQPEDFA | DYEKHKV |
| | ARDRPGYY | MTKNQVSLTCLVKGFYPSDI | | WITFSQSIIS | TYYCQQY | YACEVTH |
| | YMDVWGKG | AVEWESNGQPENNYKTTPPV | | TLT (SEQ | KSYPVTF | QGLSSPV |
| | TTVTVSS | LDSDGSFFLYSKLTVDKSRW | | ID NO: 41) | GQGTKVE | TKSFNRG |
| | (SEQ ID | QQGNVFSCSVMHEALHNHYT | | | IK (SEQ | EC (SEQ |
| | NO: | QKSLSLSPG (SEQ ID | | | ID NO: | ID NO: |
| | 1349) | NO: 44) | | | 592) | 45) |
| MIAB | EVQLLESG | ASTKGPSVFPLAPSSKSTSG | GGGGS | APTSSSTKKT | DIQMTQS | RTVAAPS |
| 130 | GGLVQPGG | GTAALGCLVKDYFPEPVTVS | (SEQ | QLQLEHLLLD | PSSLSAS | VFIFPPS |
| | SLRLSCAA | WNSGALTSGVHTFPAVLQSS | ID NO: | LQMILNGINN | VGDRVTI | DEQLKSG |
| | SGFTFSDF | GLYSLSSVVTVPSSSLGTQT | 23) | YKNPKLTRML | TCRASQS | TASVVCL |
| | WMHWVRQA | YICNVNHKPSNTKVDKKVEP | | TFKFYMPKKA | VSRSLAW | LNNFYPR |
| | PGKGLEWI | KSCDKTHTCPPCPAPEAAGA | | TELKHLQCLE | YQQKPGK | EAKVQWK |
| | SYISGDSG | PSVFLFPPKPKDTLMISRTP | | EELKPLEEAL | APKLLIY | VDNALQS |
| | YTNYADSV | EVTCVVVDVSHEDPEVKENW | | NLAPSKNFHL | AASSLQS | GNSQESV |
| | KGRFTISR | YVDGVEVHNAKTKPREEQYN | | RPRDLISDIN | GVPSRFS | TEQDSKD |
| | DNSKNTLY | STYRVVSVLTVLHQDWLNGK | | VIVLELKGSE | GSGSGTD | STYSLSS |
| | LQMNSLRA | EYKCKVSNKALPAPIEKTIS | | TTFMCEYADE | FTLTISS | TLTLSKA |
| | EDTAVYYC | KAKGQPREPQVYTLPPSREE | | TATIVEFINR | LQPEDFA | DYEKHKV |
| | ARDRPYYY | MTKNQVSLTCLVKGFYPSDI | | WITFSQSIIS | TYYCQQY | YACEVTH |
| | QMDVWGKG | AVEWESNGQPENNYKTTPPV | | TLT (SEQ | KSYPVTF | QGLSSPV |
| | TTVTVSS | LDSDGSFFLYSKLTVDKSRW | | ID NO: 41) | GQGTKVE | TKSFNRG |
| | (SEQ ID | QQGNVFSCSVMHEALHNHYT | | | IK (SEQ | EC (SEQ |
| | NO: | QKSLSLSPG (SEQ ID | | | ID NO: | ID NO: |
| | 1350) | NO: 44) | | | 592) | 45) |
| MIAB | EVQLLESG | ASTKGPSVFPLAPSSKSTSG | GGGGS | APTSSSTKKT | DIQMTQS | RTVAAPS |
| 131 | GGLVQPGG | GTAALGCLVKDYFPEPVTVS | (SEQ | QLQLEHLLLD | PSSLSAS | VFIFPPS |
| | SLRLSCAA | WNSGALTSGVHTFPAVLQSS | ID NO: | LQMILNGINN | VGDRVTI | DEQLKSG |
| | SGFTFSDF | GLYSLSSVVTVPSSSLGTQT | 23) | YKNPKLTRML | TCRASQS | TASVVCL |
| | WMHWVRQA | YICNVNHKPSNTKVDKKVEP | | TFKFYMPKKA | VSRSLAW | LNNFYPR |
| | PGKGLEWI | KSCDKTHTCPPCPAPEAAGA | | TELKHLQCLE | YQQKPGK | EAKVQWK |
| | SYISGDSG | PSVFLFPPKPKDTLMISRTP | | EELKPLEEAL | APKLLIY | VDNALQS |
| | YTNYADSV | EVTCVVVDVSHEDPEVKENW | | NLAPSKNFHL | AASSLQS | GNSQESV |
| | KGRFTISR | YVDGVEVHNAKTKPREEQYN | | RPRDLISDIN | GVPSRES | TEQDSKD |
| | DNSKNTLY | STYRVVSVLTVLHQDWLNGK | | VIVLELKGSE | GSGSGTD | STYSLSS |
| | LQMNSLRA | EYKCKVSNKALPAPIEKTIS | | TTFMCEYADE | FTLTISS | TLTLSKA |
| | EDTAVYYC | KAKGQPREPQVYTLPPSREE | | TATIVEFINR | LQPEDFA | DYEKHKV |
| | ARDRPYYY | MTKNQVSLTCLVKGFYPSDI | | WITFSQSIIS | TYYCQQY | YACEVTH |
| | GMDVWGKG | AVEWESNGQPENNYKTTPPV | | TLT (SEQ | KSYPVTF | QGLSSPV |
| | TTVTVSS | LDSDGSFFLYSKLTVDKSRW | | ID NO: 41) | GQGTKVE | TKSFNRG |
| | (SEQ ID | QQGNVFSCSVMHEALHNHYT | | | IK (SEQ | EC (SEQ |
| | NO: | QKSLSLSPG (SEQ ID | | | ID NO: | ID NO: |
| | 1351) | NO: 44) | | | 592) | 45) |
| MIAB | EVQLLESG | ASTKGPSVFPLAPSSKSTSG | GGGGS | APTSSSTKKT | DIQMTQS | RTVAAPS |
| 132 | GGLVQPGG | GTAALGCLVKDYFPEPVTVS | (SEQ | QLQLEHLLLD | PSSLSAS | VFIFPPS |
| | SLRLSCAA | WNSGALTSGVHTFPAVLQSS | ID NO: | LQMILNGINN | VGDRVTI | DEQLKSG |
| | SGFTFSNF | GLYSLSSVVTVPSSSLGTQT | 23) | YKNPKLTRML | TCRASQS | TASVVCL |
| | WMHWVRQA | YICNVNHKPSNTKVDKKVEP | | TFKFYMPKKA | VSRSLAW | LNNFYPR |
| | PGKGLEWI | KSCDKTHTCPPCPAPEAAGA | | TELKHLQCLE | YQQKPGK | EAKVQWK |
| | SYISGDSG | PSVFLFPPKPKDTLMISRTP | | EELKPLEEAL | APKLLIY | VDNALQS |
| | YTNYADSV | EVTCVVVDVSHEDPEVKENW | | NLAPSKNFHL | AASSLQS | GNSQESV |
| | KGRFTISR | YVDGVEVHNAKTKPREEQYN | | RPRDLISDIN | GVPSRES | TEQDSKD |
| | DNSKNTLY | STYRVVSVLTVLHQDWLNGK | | VIVLELKGSE | GSGSGTD | STYSLSS |
| | LQMNSLRA | EYKCKVSNKALPAPIEKTIS | | TTFMCEYADE | FTLTISS | TLTLSKA |
| | EDTAVYYC | KAKGQPREPQVYTLPPSREE | | TATIVEFINR | LQPEDFA | DYEKHKV |
| | ARDRPYYY | MTKNQVSLTCLVKGFYPSDI | | WITFSQSIIS | TYYCQQY | YACEVTH |
| | YMDVWGKG | AVEWESNGQPENNYKTTPPV | | TLT (SEQ | KSYPVTF | QGLSSPV |
| | TTVTVSS | LDSDGSFFLYSKLTVDKSRW | | ID NO: 41) | GQGTKVE | TKSFNRG |
| | SEQ ID | QQGNVFSCSVMHEALHNHYT | | | IK (SEQ | EC (SEQ |
| | NO: | QKSLSLSPG (SEQ ID | | | ID NO: | ID NO: |
| | 1352) | NO: 44) | | | 592) | 45) |
| MIAB | EVQLLESG | ASTKGPSVFPLAPSSKSTSG | GGGGS | APTSSSTKKT | DIQMTQS | RTVAAPS |
| 133 | GGLVQPGG | GTAALGCLVKDYFPEPVTVS | (SEQ | QLQLEHLLLD | PSSLSAS | VFIFPPS |
| | SLRLSCAA | WNSGALTSGVHTFPAVLQSS | ID NO: | LQMILNGINN | VGDRVTI | DEQLKSG |
| | SGFTFSSF | GLYSLSSVVTVPSSSLGTQT | 23) | YKNPKLTRML | TCRASQS | TASVVCL |
| | WMHWVRQA | YICNVNHKPSNTKVDKKVEP | | TFKFYMPKKA | VSRSLAW | LNNFYPR |
| | PGKGLEWI | KSCDKTHTCPPCPAPEAAGA | | TELKHLQCLE | YQQKPGK | EAKVQWK |
| | SYISGDSG | PSVFLFPPKPKDTLMISRTP | | EELKPLEEAL | APKLLIY | VDNALQS |
| | YTNYADSV | EVTCVVVDVSHEDPEVKENW | | NLAPSKNFHL | AASSLQS | GNSQESV |
| | KGRFTISR | YVDGVEVHNAKTKPREEQYN | | RPRDLISDIN | GVPSRES | TEQDSKD |
| | DNSKNTLY | STYRVVSVLTVLHQDWLNGK | | VIVLELKGSE | GSGSGTD | STYSLSS |
| | LQMNSLRA | EYKCKVSNKALPAPIEKTIS | | TTFMCEYADE | FTLTISS | TLTLSKA |
| | EDTAVYYC | KAKGQPREPQVYTLPPSREE | | TATIVEFINR | LQPEDFA | DYEKHKV |
| | ARDRPYYY | MTKNQVSLTCLVKGFYPSDI | | WITFSQSIIS | TYYCQQY | YACEVTH |
| | YMDVWGKG | AVEWESNGQPENNYKTTPPV | | TLT (SEQ | KSYPVTF | QGLSSPV |
| | TTVTVSS | LDSDGSFFLYSKLTVDKSRW | | ID NO: 41) | GQGTKVE | TKSFNRG |
| | (SEQ ID | QQGNVFSCSVMHEALHNHYT | | | IK (SEQ | EC (SEQ |
| | NO: | QKSLSLSPG (SEQ ID | | | ID NO: | ID NO: |
| | 1353) | NO: 44) | | | 592) | 45) |
| MIAB | EVQLLESG | ASTKGPSVFPLAPSSKSTSG | GGGGS | APTSSSTKKT | DIQMTQS | RTVAAPS |
| 134 | GGLVQPGG | GTAALGCLVKDYFPEPVTVS | (SEQ | QLQLEHLLLD | PSSLSAS | VFIFPPS |
| | SLRLSCAA | WNSGALTSGVHTFPAVLQSS | ID NO: | LQMILNGINN | VGDRVTI | DEQLKSG |
| | SGFTFSAF | GLYSLSSVVTVPSSSLGTQT | 23) | YKNPKLTRML | TCRASQS | TASVVCL |
| | WMHWVRQA | YICNVNHKPSNTKVDKKVEP | | TFKFYMPKKA | VSRSLAW | LNNFYPR |
| | PGKGLEWI | KSCDKTHTCPPCPAPEAAGA | | TELKHLQCLE | YQQKPGK | EAKVQWK |
| | SYISGDSG | PSVFLFPPKPKDTLMISRTP | | EELKPLEEAL | APKLLIY | VDNALQS |
| | YTNYADSV | EVTCVVVDVSHEDPEVKENW | | NLAPSKNFHL | AASSLQS | GNSQESV |
| | KGRFTISR | YVDGVEVHNAKTKPREEQYN | | RPRDLISDIN | GVPSRFS | TEQDSKD |
| | DNSKNTLY | STYRVVSVLTVLHQDWLNGK | | VIVLELKGSE | GSGSGTD | STYSLSS |
| | LQMNSLRA | EYKCKVSNKALPAPIEKTIS | | TTFMCEYADE | FTLTISS | TLTLSKA |
| | EDTAVYYC | KAKGQPREPQVYTLPPSREE | | TATIVEFINR | LQPEDFA | DYEKHKV |
| | ARDRPYYY | MTKNQVSLTCLVKGFYPSDI | | WITFSQSIIS | TYYCQQY | YACEVTH |
| | YMDVWGKG | AVEWESNGQPENNYKTTPPV | | TLT (SEQ | KSYPVTF | QGLSSPV |
| | TTVTVSS | LDSDGSFFLYSKLTVDKSRW | | ID NO: 41) | GQGTKVE | TKSFNRG |
| | (SEQ ID | QQGNVFSCSVMHEALHNHYT | | | IK (SEQ | EC (SEQ |
| | NO: | QKSLSLSPG (SEQ ID | | | ID NO: | ID NO: |
| | 1354) | NO: 44) | | | 592) | 45) |
| MIAB | EVQLLESG | ASTKGPSVFPLAPSSKSTSG | GGGGS | APTSSSTKKT | DIQMTQS | RTVAAPS |
| 135 | GGLVQPGG | GTAALGCLVKDYFPEPVTVS | (SEQ | QLQLEHLLLD | PSSLSAS | VFIFPPS |
| | SLRLSCAA | WNSGALTSGVHTFPAVLQSS | ID NO: | LQMILNGINN | VGDRVTI | DEQLKSG |
| | SGFTFSDF | GLYSLSSVVTVPSSSLGTQT | 23) | YKNPKLTRML | TCRASQS | TASVVCL |
| | WMHWVRQA | YICNVNHKPSNTKVDKKVEP | | TFKFYMPKKA | VSRSLAW | LNNFYPR |
| | PGKGLEWI | KSCDKTHTCPPCPAPEAAGA | | TELKHLQCLE | YQQKPGK | EAKVQWK |
| | SYISGDSG | PSVFLFPPKPKDTLMISRTP | | EELKPLEEAL | APKLLIY | VDNALQS |
| | YTNYADSV | EVTCVVVDVSHEDPEVKENW | | NLAPSKNFHL | AASSLQS | GNSQESV |
| | KGRFTISR | YVDGVEVHNAKTKPREEQYN | | RPRDLISDIN | GVPSRFS | TEQDSKD |
| | DNSNNTLY | STYRVVSVLTVLHQDWLNGK | | VIVLELKGSE | GSGSGTD | STYSLSS |
| | LQMNSLRA | EYKCKVSNKALPAPIEKTIS | | TTFMCEYADE | FTLTISS | TLTLSKA |
| | EDTAVYYC | KAKGQPREPQVYTLPPSREE | | TATIVEFINR | LQPEDFA | DYEKHKV |
| | ARDRPYYY | MTKNQVSLTCLVKGFYPSDI | | WITFSQSIIS | TYYCQQY | YACEVTH |
| | YMDVWGKG | AVEWESNGQPENNYKTTPPV | | TLT (SEQ | KSYPVTF | QGLSSPV |
| | TTVTVSS | LDSDGSFFLYSKLTVDKSRW | | ID NO: 41) | GQGTKVE | TKSFNRG |
| | (SEQ ID | QQGNVFSCSVMHEALHNHYT | | | IK (SEQ | EC (SEQ |
| | NO: | QKSLSLSPG (SEQ ID | | | ID NO: | ID NO: |
| | 1355) | NO: 44) | | | 592) | 45) |
| MIAB | EVQLLESG | ASTKGPSVFPLAPSSKSTSG | GGGGS | APTSSSTKKT | DIQMTQS | RTVAAPS |
| 136 | GGLVQPGG | GTAALGCLVKDYFPEPVTVS | (SEQ | QLQLEHLLLD | PSSLSAS | VFIFPPS |
| | SLRLSCAA | WNSGALTSGVHTFPAVLQSS | ID NO: | LQMILNGINN | VGDRVTI | DEQLKSG |
| | SGFTFSSY | GLYSLSSVVTVPSSSLGTQT | 23) | YKNPKLTRML | TCRASQS | TASVVCL |
| | AMSWVRQA | YICNVNHKPSNTKVDKKVEP | | TFKFYMPKKA | VSRSLAW | LNNFYPR |
| | PGKGLEWI | KSCDKTHTCPPCPAPEAAGA | | TELKHLQCLE | YQQKPGK | EAKVQWK |
| | SYISGDSG | PSVFLFPPKPKDTLMISRTP | | EELKPLEEAL | APKLLIY | VDNALQS |
| | YTNYADSV | EVTCVVVDVSHEDPEVKENW | | NLAPSKNFHL | AASSLQS | GNSQESV |
| | KGRFTISR | YVDGVEVHNAKTKPREEQYN | | RPRDLISDIN | GVPSRFS | TEQDSKD |
| | DNSKNTLY | STYRVVSVLTVLHQDWLNGK | | VIVLELKGSE | GSGSGTD | STYSLSS |
| | LQMNSLRA | EYKCKVSNKALPAPIEKTIS | | TTFMCEYADE | FTLTISS | TLTLSKA |
| | EDTAVYYC | KAKGQPREPQVYTLPPSREE | | TATIVEFINR | LQPEDFA | DYEKHKV |
| | ARDRPYYY | MTKNQVSLTCLVKGFYPSDI | | WITFSQSIIS | TYYCQQY | YACEVTH |
| | YMDVWGKG | AVEWESNGQPENNYKTTPPV | | TLT (SEQ | KSYPVTF | QGLSSPV |
| | TTVTVSS | LDSDGSFFLYSKLTVDKSRW | | ID NO: 41) | GQGTKVE | TKSFNRG |
| | (SEQ ID | QQGNVFSCSVMHEALHNHYT | | | IK (SEQ | EC (SEQ |
| | NO: | QKSLSLSPG (SEQ ID | | | ID NO: | ID NO: |
| | 1356) | NO: 44) | | | 592) | 45) |
| MIAB | EVQLLESG | ASTKGPSVFPLAPSSKSTSG | GGGGS | APTSSSTKKT | DIQMTQS | RTVAAPS |
| 137 | GGLVQPGG | GTAALGCLVKDYFPEPVTVS | (SEQ | QLQLEHLLLD | PSSLSAS | VFIFPPS |
| | SLRLSCAA | WNSGALTSGVHTFPAVLQSS | ID NO: | LQMILNGINN | VGDRVTI | DEQLKSG |
| | SGFTFSDF | GLYSLSSVVTVPSSSLGTQT | 23) | YKNPKLTRML | TCRASQS | TASVVCL |
| | WMHWVRQA | YICNVNHKPSNTKVDKKVEP | | TFKFYMPKKA | VSRSLAW | LNNFYPR |
| | PGKGLEWV | KSCDKTHTCPPCPAPEAAGA | | TELKHLQCLE | YQQKPGK | EAKVQWK |
| | SAISGSGG | PSVFLFPPKPKDTLMISRTP | | EELKPLEEAL | APKLLIY | VDNALQS |
| | STYYADSV | EVTCVVVDVSHEDPEVKENW | | NLAPSKNFHL | AASSLQS | GNSQESV |
| | KGRFTISR | YVDGVEVHNAKTKPREEQYN | | RPRDLISDIN | GVPSRFS | TEQDSKD |
| | DNSKNTLY | STYRVVSVLTVLHQDWLNGK | | VIVLELKGSE | GSGSGTD | STYSLSS |
| | LQMNSLRA | EYKCKVSNKALPAPIEKTIS | | TTFMCEYADE | FTLTISS | TLTLSKA |
| | EDTAVYYC | KAKGQPREPQVYTLPPSREE | | TATIVEFINR | LQPEDFA | DYEKHKV |
| | ARDRPYYY | MTKNQVSLTCLVKGFYPSDI | | WITFSQSIIS | TYYCQQY | YACEVTH |
| | YMDVWGKG | AVEWESNGQPENNYKTTPPV | | TLT (SEQ | KSYPVTF | QGLSSPV |
| | TTVTVSS | LDSDGSFFLYSKLTVDKSRW | | ID NO: 41) | GQGTKVE | TKSFNRG |
| | (SEQ ID | QQGNVFSCSVMHEALHNHYT | | | IK (SEQ | EC (SEQ |
| | NO: | QKSLSLSPG (SEQ ID | | | ID NO: | ID NO: |
| | 1357) | NO: 44) | | | 592) | 45) |
| MIAB | EVQLLESG | ASTKGPSVFPLAPSSKSTSG | GGGGS | APTSSSTKKT | DIQMTQS | RTVAAPS |
| 138 | GGLVQPGG | GTAALGCLVKDYFPEPVTVS | (SEQ | QLQLEHLLLD | PSSLSAS | VFIFPPS |
| | SLRLSCAA | WNSGALTSGVHTFPAVLQSS | ID NO: | LQMILNGINN | VGDRVTI | DEQLKSG |
| | SGFTFSSY | GLYSLSSVVTVPSSSLGTQT | 23) | YKNPKLTRML | TCRASOS | TASVVCL |
| | AMSWVRQA | YICNVNHKPSNTKVDKKVEP | | TFKFYMPKKA | VSRSLAW | LNNFYPR |
| | PGKGLEWV | KSCDKTHTCPPCPAPEAAGA | | TELKHLQCLE | YQQKPGK | EAKVQWK |
| | SAISGSGG | PSVFLFPPKPKDTLMISRTP | | EELKPLEEAL | APKLLIY | VDNALQS |
| | STYYADSV | EVTCVVVDVSHEDPEVKENW | | NLAPSKNFHL | AASSLQS | GNSQESV |
| | KGRFTISR | YVDGVEVHNAKTKPREEQYN | | RPRDLISDIN | GVPSRFS | TEQDSKD |
| | DNSKNTLY | STYRVVSVLTVLHQDWLNGK | | VIVLELKGSE | GSGSGTD | STYSLSS |
| | LQMNSLRA | EYKCKVSNKALPAPIEKTIS | | TTFMCEYADE | FTLTISS | TLTLSKA |
| | EDTAVYYC | KAKGQPREPQVYTLPPSREE | | TATIVEFINR | LQPEDFA | DYEKHKV |
| | ARDRPYYY | MTKNQVSLTCLVKGFYPSDI | | WITFSQSIIS | TYYCQQY | YACEVTH |
| | YMDVWGKG | AVEWESNGQPENNYKTTPPV | | TLT (SEQ | KSYPVTF | QGLSSPV |
| | TTVTVSS | LDSDGSFFLYSKLTVDKSRW | | ID NO: 41) | GQGTKVE | TKSFNRG |
| | (SEQ ID | QQGNVFSCSVMHEALHNHYT | | | IK (SEQ | EC (SEQ |
| | NO: | QKSLSLSPG (SEQ ID | | | ID NO: | ID NO: |
| | 1358) | NO: 44) | | | 592) | 45) |
| MIAB | EVQLLESG | ASTKGPSVFPLAPSSKSTSG | GGGGS | APTSSSTKKT | DIQMTQS | RTVAAPS |
| 139 | GGLVQPGG | GTAALGCLVKDYFPEPVTVS | (SEQ | QLQLEHLLLD | PSSLSAS | VFIFPPS |
| | SLRLSCAA | WNSGALTSGVHTFPAVLQSS | ID NO: | LQMILNGINN | VGDRVTI | DEQLKSG |
| | SGFTFSDF | GLYSLSSVVTVPSSSLGTQT | 23) | YKNPKLTRML | TCRASQS | TASVVCL |
| | WMHWVRQA | YICNVNHKPSNTKVDKKVEP | | TFKFYMPKKA | ISSYLNW | LNNFYPR |
| | PGKGLEWI | KSCDKTHTCPPCPAPEAAGA | | TELKHLQCLE | YQQKPGK | EAKVQWK |
| | SYISGDSG | PSVFLFPPKPKDTLMISRTP | | EELKPLEEAL | APKLLIY | VDNALQS |
| | YTNYADSV | EVTCVVVDVSHEDPEVKENW | | NLAPSKNFHL | AASSLQS | GNSQESV |
| | KGRFTISR | YVDGVEVHNAKTKPREEQYN | | RPRDLISDIN | GVPSRFS | TEQDSKD |
| | DNSKNTLY | STYRVVSVLTVLHQDWLNGK | | VIVLELKGSE | GSGSGTD | STYSLSS |
| | LQMNSLRA | EYKCKVSNKALPAPIEKTIS | | TTFMCEYADE | FTLTISS | TLTLSKA |
| | EDTAVYYC | KAKGQPREPQVYTLPPSREE | | TATIVEFINR | LQPEDFA | DYEKHKV |
| | ARDRPYYY | MTKNQVSLTCLVKGFYPSDI | | WITFSQSIIS | TYYCQQS | YACEVTH |
| | YMDVWGKG | AVEWESNGQPENNYKTTPPV | | TLT (SEQ | YSTPRTF | QGLSSPV |
| | TTVTVSS | LDSDGSFFLYSKLTVDKSRW | | ID NO: 41) | GQGTKVE | TKSFNRG |
| | (SEQ ID | QQGNVFSCSVMHEALHNHYT | | | IK (SEQ | EC (SEQ |
| | NO: 591) | QKSLSLSPG (SEQ ID | | | ID NO: | ID NO: |
| | | NO: 44) | | | 1360) | 45) |
| MIAB | EVQLLESG | ASTKGPSVFPLAPSSKSTSG | GGGGS | APTSSSTKKT | DIQMTQS | RTVAAPS |
| 140 | GGLVQPGG | GTAALGCLVKDYFPEPVTVS | (SEQ | QLQLEHLLLD | PSSLSAS | VFIFPPS |
| | SLRLSCAA | WNSGALTSGVHTFPAVLQSS | ID NO: | LQMILNGINN | VGDRVTI | DEQLKSG |
| | SGFTFSSY | GLYSLSSVVTVPSSSLGTQT | 23) | YKNPKLTRML | TCRASQS | TASVVCL |
| | AMSWVRQA | YICNVNHKPSNTKVDKKVEP | | TFKFYMPKKA | ISSYLNW | LNNFYPR |
| | PGKGLEWV | KSCDKTHTCPPCPAPEAAGA | | TELKHLQCLE | YQQKPGK | EAKVQWK |
| | SAISGSGG | PSVFLFPPKPKDTLMISRTP | | EELKPLEEAL | APKLLIY | VDNALQS |
| | STYYADSV | EVTCVVVDVSHEDPEVKENW | | NLAPSKNFHL | AASSLQS | GNSQESV |
| | KGRFTISR | YVDGVEVHNAKTKPREEQYN | | RPRDLISDIN | GVPSRFS | TEQDSKD |
| | DNSKNTLY | STYRVVSVLTVLHQDWLNGK | | VIVLELKGSE | GSGSGTD | STYSLSS |
| | LQMNSLRA | EYKCKVSNKALPAPIEKTIS | | TTFMCEYADE | FTLTISS | TLTLSKA |
| | EDTAVYYC | KAKGQPREPQVYTLPPSREE | | TATIVEFINR | LQPEDFA | DYEKHKV |
| | ARDRPYYY | MTKNQVSLTCLVKGFYPSDI | | WITFSQSIIS | TYYCQQS | YACEVTH |
| | YMDVWGKG | AVEWESNGQPENNYKTTPPV | | TLT (SEQ | YSTPRTF | QGLSSPV |
| | TTVTVSS | LDSDGSFFLYSKLTVDKSRW | | ID NO: 41) | GQGTKVE | TKSFNRG |
| | (SEQ ID | QQGNVFSCSVMHEALHNHYT | | | IK (SEQ | EC (SEQ |
| | NO: | QKSLSLSPG (SEQ ID | | | ID NO: | ID NO: |
| | 1358) | NO: 44) | | | 1360) | 45) |
| MIAB | EVQLLESG | ASTKGPSVFPLAPSSKSTSG | GGGGS | APTSSSTKKT | DIQMTQS | RTVAAPS |
| 141 | GGLVQPGG | GTAALGCLVKDYFPEPVTVS | (SEQ | QLQLEHLLLD | PSSLSAS | VFIFPPS |
| | SLRLSCAA | WNSGALTSGVHTFPAVLQSS | ID NO: | LQMILNGINN | VGDRVTI | DEQLKSG |
| | SGFTFSDF | GLYSLSSVVTVPSSSLGTQT | 23) | YKNPKLTRML | TCRASQS | TASVVCL |
| | WMHWVRQA | YICNVNHKPSNTKVDKKVEP | | TFKFYMPKKA | ISSYLNW | LNNFYPR |
| | PGKGLEWI | KSCDKTHTCPPCPAPEAAGA | | TELKHLQCLE | YQQKPGK | EAKVQWK |
| | SYISGDSG | PSVFLFPPKPKDTLMISRTP | | EELKPLEEAL | APKLLIY | VDNALQS |
| | YTNYADSV | EVTCVVVDVSHEDPEVKENW | | NLAPSKNFHL | AASSLQS | GNSQESV |
| | KGRFTISR | YVDGVEVHNAKTKPREEQYN | | RPRDLISDIN | GVPSRFS | TEQDSKD |
| | DNSKNTLY | STYRVVSVLTVLHQDWLNGK | | VIVLELKGSE | GSGSGTD | STYSLSS |
| | LQMNSLRA | EYKCKVSNKALPAPIEKTIS | | TTFMCEYADE | FTLTISS | TLTLSKA |
| | EDTAVYYC | KAKGQPREPQVYTLPPSREE | | TATIVEFINR | LQPEDFA | DYEKHKV |
| | ARDRPYYY | MTKNQVSLTCLVKGFYPSDI | | WITFSQSIIS | TYYCQQY | YACEVTH |
| | YMDVWGKG | AVEWESNGQPENNYKTTPPV | | TLT (SEQ | KSYPVTF | QGLSSPV |
| | TTVTVSS | LDSDGSFFLYSKLTVDKSRW | | ID NO: 41) | GQGTKVE | TKSFNRG |
| | (SEQ ID | QQGNVFSCSVMHEALHNHYT | | | IK (SEQ | EC (SEQ |
| | NO: 591) | QKSLSLSPG (SEQ ID | | | ID NO: | ID NO: |
| | | NO: 44) | | | 1361) | 45) |
| MIAB | EVQLLESG | ASTKGPSVFPLAPSSKSTSG | GGGGS | APTSSSTKKT | DIQMTQS | RTVAAPS |
| 142 | GGLVQPGG | GTAALGCLVKDYFPEPVTVS | (SEQ | QLQLEHLLLD | PSSLSAS | VFIFPPS |
| | SLRLSCAA | WNSGALTSGVHTFPAVLQSS | ID NO: | LQMILNGINN | VGDRVTI | DEQLKSG |
| | SGFTFSDF | GLYSLSSVVTVPSSSLGTQT | 23) | YKNPKLTRML | TCRASQS | TASVVCL |
| | WMHWVRQA | YICNVNHKPSNTKVDKKVEP | | TFKFYMPKKA | VSRSLAW | LNNFYPR |
| | PGKGLEWI | KSCDKTHTCPPCPAPEAAGA | | TELKHLQCLE | YQQKPGK | EAKVQWK |
| | SYISGDSG | PSVFLFPPKPKDTLMISRTP | | EELKPLEEAL | APKLLIY | VDNALQS |
| | YTNYADSV | EVTCVVVDVSHEDPEVKENW | | NLAPSKNFHL | AASSLQS | GNSQESV |
| | KGRFTISR | YVDGVEVHNAKTKPREEQYN | | RPRDLISDIN | GVPSRFS | TEQDSKD |
| | DNSKNTLY | STYRVVSVLTVLHQDWLNGK | | VIVLELKGSE | GSGSGTD | STYSLSS |
| | LQMNSLRA | EYKCKVSNKALPAPIEKTIS | | TTFMCEYADE | FTLTISS | TLTLSKA |
| | EDTAVYYC | KAKGQPREPQVYTLPPSREE | | TATIVEFINR | LQPEDFA | DYEKHKV |
| | ARDRPYYY | MTKNQVSLTCLVKGFYPSDI | | WITFSQSIIS | TYYCQQS | YACEVTH |
| | YMDVWGKG | AVEWESNGQPENNYKTTPPV | | TLT (SEQ | YSTPRTF | QGLSSPV |
| | TTVTVSS | LDSDGSFFLYSKLTVDKSRW | | ID NO: 41) | GQGTKVE | TKSFNRG |
| | (SEQ ID | QQGNVFSCSVMHEALHNHYT | | | IK (SEQ | EC (SEQ |
| | NO: 591) | QKSLSLSPG (SEQ ID | | | ID NO: | ID NO: |
| | | NO: 44) | | | 1362) | 45) |
| MIAB | EVQLLESG | ASTKGPSVFPLAPSSKSTSG | GGGGS | APTSSSTKKT | DIQMTQS | RTVAAPS |
| 143 | GGLVQPGG | GTAALGCLVKDYFPEPVTVS | (SEQ | QLQLEHLLLD | PSSLSAS | VFIFPPS |
| | SLRLSCAA | WNSGALTSGVHTFPAVLQSS | ID NO: | LQMILNGINN | VGDRVTI | DEQLKSG |
| | SGFTFSDF | GLYSLSSVVTVPSSSLGTQT | 23) | YKNPKLTRML | TCRASQS | TASVVCL |
| | WMHWVRQA | YICNVNHKPSNTKVDKKVEP | | TFKFYMPKKA | VSRSLAW | LNNFYPR |
| | PGKGLEWI | KSCDKTHTCPPCPAPEAAGA | | TELKHLQCLE | YQQKPGK | EAKVQWK |
| | SYISGDSG | PSVFLFPPKPKDTLMISRTP | | EELKPLEEAL | APKLLIY | VDNALQS |
| | YTNYADSV | EVTCVVVDVSHEDPEVKENW | | NLAPSKNFHL | AASSLQS | GNSQESV |
| | KGRFTISR | YVDGVEVHNAKTKPREEQYN | | RPRDLISDIN | GVPSRFS | TEQDSKD |
| | DNSKNTLY | STYRVVSVLTVLHQDWLNGK | | VIVLELKGSE | GSGSGTD | STYSLSS |
| | LQMNSLRA | EYKCKVSNKALPAPIEKTIS | | TTFMCEYADE | FTLTISS | TLTLSKA |
| | EDTAVYYC | KAKGQPREPQVYTLPPSREE | | TATIVEFINR | LQPEDFA | DYEKHKV |
| | ARDRPYYY | MTKNQVSLTCLVKGFYPSDI | | WITFSQSIIS | TYYCQQY | YACEVTH |
| | YMDVWGKG | AVEWESNGQPENNYKTTPPV | | TLT (SEQ | KSYPVTF | QGLSSPV |
| | TTVTVSS | LDSDGSFFLYSKLTVDKSRW | | ID NO: 41) | GQGTKVE | TKSFNRG |
| | (SEQ ID | QQGNVFSCSVMHEALHNHYT | | | IK (SEQ | EC (SEQ |
| | NO: 591) | QKSLSLSPG (SEQ ID | | | ID NO: | ID NO: |
| | | NO: 44) | | | 592) | 45) |
| MIAB | EVQLLESG | ASTKGPSVFPLAPSSKSTSG | GGGGS | APTSSSTKKT | DIQMTQS | RTVAAPS |
| 144 | GGLVQPGG | GTAALGCLVKDYFPEPVTVS | (SEQ | QLQLEHLLLD | PSSLSAS | VFIFPPS |
| | SLRLSCAA | WNSGALTSGVHTFPAVLQSS | ID NO: | LQMILNGINN | VGDRVTI | DEQLKSG |
| | SGFTFSDF | GLYSLSSVVTVPSSSLGTQT | 23) | YKNPKLTRML | TCRASOS | TASVVCL |
| | WMHWVRQA | YICNVNHKPSNTKVDKKVEP | | TFKFYMPKKA | VSRSLAW | LNNFYPR |
| | PGKGLEWI | KSCDKTHTCPPCPAPEAAGA | | TELKHLQCLE | YQQKPGK | EAKVQWK |
| | SYISGDSG | PSVFLFPPKPKDTLMISRTP | | EELKPLEEAL | APKLLIY | VDNALQS |
| | YTNYADSV | EVTCVVVDVSHEDPEVKENW | | NLAPSKNFHL | AASSLQS | GNSQESV |
| | KGRFTISR | YVDGVEVHNAKTKPREEQYN | | RPRDLISDIN | GVPSRFS | TEQDSKD |
| | DNSKNTLY | STYRVVSVLTVLHQDWLNGK | | VIVLELKGSE | GSGSGTD | STYSLSS |
| | LQMNSLRA | EYKCKVSNKALPAPIEKTIS | | TTFMCEYADE | FTLTISS | TLTLSKA |
| | EDTAVYYC | KAKGQPREPQVYTLPPSREE | | TATIVEFINR | LQPEDFA | DYEKHKV |
| | ARDRPYYY | MTKNQVSLTCLVKGFYPSDI | | WITFSQSIIS | TYYCQQY | YACEVTH |
| | YMDVWGKG | AVEWESNGQPENNYKTTPPV | | TLT (SEQ | KSYPVTF | QGLSSPV |
| | TTVTVSS | LDSDGSFFLYSKLTVDKSRW | | ID NO: 41) | GQGTKVE | TKSFNRG |
| | (SEQ ID | QQGNVFSCSVMHEALHNHYT | | | IK (SEQ | EC (SEQ |
| | NO: 591) | QKSLSLSPG (SEQ ID | | | ID NO: | ID NO: |
| | | NO: 44) | | | 592) | 45) |
| MIAB | EVQLLESG | ASTKGPSVFPLAPSSKSTSG | GGGGS | APTSSSTKKT | DIQMTQS | RTVAAPS |
| 145 | GGLVQPGG | GTAALGCLVKDYFPEPVTVS | (SEQ | QLQLEHLLLD | PSSLSAS | VFIFPPS |
| | SLRLSCAA | WNSGALTSGVHTFPAVLQSS | ID NO: | LQMILNGINN | VGDRVTI | DEQLKSG |
| | SGFTFSDF | GLYSLSSVVTVPSSSLGTQT | 23) | YKNPKLTRML | TCRASQS | TASVVCL |
| | WMHWVRQA | YICNVNHKPSNTKVDKKVEP | | TFKFYMPKKA | ISRSLAW | LNNFYPR |
| | PGKGLEWI | KSCDKTHTCPPCPAPEAAGA | | TELKHLQCLE | YQQKPGK | EAKVQWK |
| | SYISGDSG | PSVFLFPPKPKDTLMISRTP | | EELKPLEEAL | APKLLIY | VDNALQS |
| | YTNYADSV | EVTCVVVDVSHEDPEVKENW | | NLAPSKNFHL | AASSLQS | GNSQESV |
| | KGRFTISR | YVDGVEVHNAKTKPREEQYN | | RPRDLISDIN | GVPSRES | TEQDSKD |
| | DNSKNTLY | STYRVVSVLTVLHQDWLNGK | | VIVLELKGSE | GSGSGTD | STYSLSS |
| | LQMNSLRA | EYKCKVSNKALPAPIEKTIS | | TTFMCEYADE | FTLTISS | TLTLSKA |
| | EDTAVYYC | KAKGQPREPQVYTLPPSREE | | TATIVEFINR | LQPEDFA | DYEKHKV |
| | ARDRPYYY | MTKNQVSLTCLVKGFYPSDI | | WITFSQSIIS | TYYCQQY | YACEVTH |
| | YMDVWGKG | AVEWESNGQPENNYKTTPPV | | TLT (SEQ | KSYPVTF | QGLSSPV |
| | TTVTVSS | LDSDGSFFLYSKLTVDKSRW | | ID NO: 41) | GQGTKVE | TKSFNRG |
| | (SEQ ID | QQGNVFSCSVMHEALHNHYT | | | IK (SEQ | EC (SEQ |
| | NO: 591) | QKSLSLSPG (SEQ ID | | | ID NO: | ID NO: |
| | | NO: 44) | | | 1363) | 45) |
| MIAB | EVQLLESG | ASTKGPSVFPLAPSSKSTSG | GGGGS | APTSSSTKKT | DIQMTQS | RTVAAPS |
| 146 | GGLVQPGG | GTAALGCLVKDYFPEPVTVS | (SEQ | QLQLEHLLLD | PSSLSAS | VFIFPPS |
| | SLRLSCAA | WNSGALTSGVHTFPAVLQSS | ID NO: | LQMILNGINN | VGDRVTI | DEQLKSG |
| | SGFTESDE | GLYSLSSVVTVPSSSLGTQT | 23) | YKNPKLTRML | TCRASOS | TASVVCL |
| | WMHWVRQA | YICNVNHKPSNTKVDKKVEP | | TFKFYMPKKA | VSSSLAW | LNNFYPR |
| | PGKGLEWI | KSCDKTHTCPPCPAPEAAGA | | TELKHLQCLE | YQQKPGK | EAKVQWK |
| | SYISGDSG | PSVFLFPPKPKDTLMISRTP | | EELKPLEEAL | APKLLIY | VDNALQS |
| | YTNYADSV | EVTCVVVDVSHEDPEVKENW | | NLAPSKNFHL | AASSLQS | GNSQESV |
| | KGRFTISR | YVDGVEVHNAKTKPREEQYN | | RPRDLISDIN | GVPSRFS | TEQDSKD |
| | DNSKNTLY | STYRVVSVLTVLHQDWLNGK | | VIVLELKGSE | GSGSGTD | STYSLSS |
| | LQMNSLRA | EYKCKVSNKALPAPIEKTIS | | TTFMCEYADE | FTLTISS | TLTLSKA |
| | EDTAVYYC | KAKGQPREPQVYTLPPSREE | | TATIVEFINR | LQPEDFA | DYEKHKV |
| | ARDRPYYY | MTKNQVSLTCLVKGFYPSDI | | WITFSQSIIS | TYYCQQY | YACEVTH |
| | YMDVWGKG | AVEWESNGQPENNYKTTPPV | | TLT (SEQ | KSYPVTF | QGLSSPV |
| | TTVTVSS | LDSDGSFFLYSKLTVDKSRW | | ID NO: 41) | GQGTKVE | TKSFNRG |
| | (SEQ ID | QQGNVFSCSVMHEALHNHYT | | | IK (SEQ | EC (SEQ |
| | NO: 591) | QKSLSLSPG (SEQ ID | | | ID NO: | ID NO: |
| | | NO: 44) | | | 1364) | 45) |
| MIAB | EVQLLESG | ASTKGPSVFPLAPSSKSTSG | GGGGS | APTSSSTKKT | DIQMTQS | RTVAAPS |
| 147 | GGLVQPGG | GTAALGCLVKDYFPEPVTVS | (SEQ | QLQLEHLLLD | PSSLSAS | VFIFPPS |
| | SLRLSCAA | WNSGALTSGVHTFPAVLQSS | ID NO: | LQMILNGINN | VGDRVTI | DEQLKSG |
| | SGFTFSDF | GLYSLSSVVTVPSSSLGTQT | 23) | YKNPKLTRML | TCRASQS | TASVVCL |
| | WMHWVRQA | YICNVNHKPSNTKVDKKVEP | | TFKFYMPKKA | VSRYLAW | LNNFYPR |
| | PGKGLEWI | KSCDKTHTCPPCPAPEAAGA | | TELKHLQCLE | YQQKPGK | EAKVQWK |
| | SYISGDSG | PSVFLFPPKPKDTLMISRTP | | EELKPLEEAL | APKLLIY | VDNALQS |
| | YTNYADSV | EVTCVVVDVSHEDPEVKENW | | NLAPSKNFHL | AASSLQS | GNSQESV |
| | KGRFTISR | YVDGVEVHNAKTKPREEQYN | | RPRDLISDIN | GVPSRFS | TEQDSKD |
| | DNSKNTLY | STYRVVSVLTVLHQDWLNGK | | VIVLELKGSE | GSGSGTD | STYSLSS |
| | LQMNSLRA | EYKCKVSNKALPAPIEKTIS | | TTFMCEYADE | FTLTISS | TLTLSKA |
| | EDTAVYYC | KAKGQPREPQVYTLPPSREE | | TATIVEFINR | LQPEDFA | DYEKHKV |
| | ARDRPYYY | MTKNQVSLTCLVKGFYPSDI | | WITFSQSIIS | TYYCQQY | YACEVTH |
| | YMDVWGKG | AVEWESNGQPENNYKTTPPV | | TLT (SEQ | KSYPVTF | QGLSSPV |
| | TTVTVSS | LDSDGSFFLYSKLTVDKSRW | | ID NO: 41) | GQGTKVE | TKSFNRG |
| | (SEQ ID | QQGNVFSCSVMHEALHNHYT | | | IK (SEQ | EC (SEQ |
| | NO: 591) | QKSLSLSPG (SEQ ID | | | ID NO: | ID NO: |
| | | NO: 44) | | | 1365) | 45) |
| MIAB | EVQLLESG | ASTKGPSVFPLAPSSKSTSG | GGGGS | APTSSSTKKT | DIQMTQS | RTVAAPS |
| 148 | GGLVQPGG | GTAALGCLVKDYFPEPVTVS | (SEQ | QLQLEHLLLD | PSSLSAS | VFIFPPS |
| | SLRLSCAA | WNSGALTSGVHTFPAVLQSS | ID NO: | LQMILNGINN | VGDRVTI | DEQLKSG |
| | SGFTFSDF | GLYSLSSVVTVPSSSLGTQT | 23) | YKNPKLTRML | TCRASQS | TASVVCL |
| | WMHWVRQA | YICNVNHKPSNTKVDKKVEP | | TFKFYMPKKA | VSRSLNW | LNNFYPR |
| | PGKGLEWI | KSCDKTHTCPPCPAPEAAGA | | TELKHLQCLE | YQQKPGK | EAKVQWK |
| | SYISGDSG | PSVFLFPPKPKDTLMISRTP | | EELKPLEEAL | APKLLIY | VDNALQS |
| | YTNYADSV | EVTCVVVDVSHEDPEVKENW | | NLAPSKNFHL | AASSLQS | GNSQESV |
| | KGRFTISR | YVDGVEVHNAKTKPREEQYN | | RPRDLISDIN | GVPSRES | TEQDSKD |
| | DNSKNTLY | STYRVVSVLTVLHQDWLNGK | | VIVLELKGSE | GSGSGTD | STYSLSS |
| | LQMNSLRA | EYKCKVSNKALPAPIEKTIS | | TTFMCEYADE | FTLTISS | TLTLSKA |
| | EDTAVYYC | KAKGQPREPQVYTLPPSREE | | TATIVEFINR | LQPEDFA | DYEKHKV |
| | ARDRPYYY | MTKNQVSLTCLVKGFYPSDI | | WITFSQSIIS | TYYCQQY | YACEVTH |
| | YMDVWGKG | AVEWESNGQPENNYKTTPPV | | TLT (SEQ | KSYPVTF | QGLSSPV |
| | TTVTVSS | LDSDGSFFLYSKLTVDKSRW | | ID NO: 41) | GQGTKVE | TKSFNRG |
| | (SEQ ID | QQGNVFSCSVMHEALHNHYT | | | IK (SEQ | EC (SEQ |
| | NO: 591) | QKSLSLSPG (SEQ ID | | | ID NO: | ID NO: |
| | | NO: 44) | | | 1366) | 45) |
| MIAB | EVQLLESG | ASTKGPSVFPLAPSSKSTSG | GGGGS | APTSSSTKKT | DIQMTQS | RTVAAPS |
| 149 | GGLVQPGG | GTAALGCLVKDYFPEPVTVS | (SEQ | QLQLEHLLLD | PSSLSAS | VFIFPPS |
| | SLRLSCAA | WNSGALTSGVHTFPAVLQSS | ID NO: | LQMILNGINN | VGDRVTI | DEQLKSG |
| | SGFTFSDF | GLYSLSSVVTVPSSSLGTQT | 23) | YKNPKLTRML | TCRASQS | TASVVCL |
| | WMHWVRQA | YICNVNHKPSNTKVDKKVEP | | TFKFYMPKKA | ISSSLAW | LNNFYPR |
| | PGKGLEWI | KSCDKTHTCPPCPAPEAAGA | | TELKHLQCLE | YQQKPGK | EAKVQWK |
| | SYISGDSG | PSVFLFPPKPKDTLMISRTP | | EELKPLEEAL | APKLLIY | VDNALQS |
| | YTNYADSV | EVTCVVVDVSHEDPEVKENW | | NLAPSKNFHL | AASSLQS | GNSQESV |
| | KGRFTISR | YVDGVEVHNAKTKPREEQYN | | RPRDLISDIN | GVPSRES | TEQDSKD |
| | DNSKNTLY | STYRVVSVLTVLHQDWLNGK | | VIVLELKGSE | GSGSGTD | STYSLSS |
| | LQMNSLRA | EYKCKVSNKALPAPIEKTIS | | TTFMCEYADE | FTLTISS | TLTLSKA |
| | EDTAVYYC | KAKGQPREPQVYTLPPSREE | | TATIVEFINR | LQPEDFA | DYEKHKV |
| | ARDRPYYY | MTKNQVSLTCLVKGFYPSDI | | WITFSQSIIS | TYYCQQY | YACEVTH |
| | YMDVWGKG | AVEWESNGQPENNYKTTPPV | | TLT (SEQ | KSYPVTF | QGLSSPV |
| | TTVTVSS | LDSDGSFFLYSKLTVDKSRW | | ID NO: 41) | GQGTKVE | TKSFNRG |
| | (SEQ ID | QQGNVFSCSVMHEALHNHYT | | | IK (SEQ | EC (SEQ |
| | NO: 591) | QKSLSLSPG (SEQ ID | | | ID NO: | ID NO: |
| | | NO: 44) | | | 1367) | 45) |
| MIAB | EVQLLESG | ASTKGPSVFPLAPSSKSTSG | GGGGS | APTSSSTKKT | DIQMTQS | RTVAAPS |
| 150 | GGLVQPGG | GTAALGCLVKDYFPEPVTVS | (SEQ | QLQLEHLLLD | PSSLSAS | VFIFPPS |
| | SLRLSCAA | WNSGALTSGVHTFPAVLQSS | ID NO: | LQMILNGINN | VGDRVTI | DEQLKSG |
| | SGFTFSDF | GLYSLSSVVTVPSSSLGTQT | 23) | YKNPKLTRML | TCRASOS | TASVVCL |
| | WMHWVRQA | YICNVNHKPSNTKVDKKVEP | | TFKFYMPKKA | ISRYLAW | LNNFYPR |
| | PGKGLEWI | KSCDKTHTCPPCPAPEAAGA | | TELKHLQCLE | YQQKPGK | EAKVQWK |
| | SYISGDSG | PSVFLFPPKPKDTLMISRTP | | EELKPLEEAL | APKLLIY | VDNALQS |
| | YTNYADSV | EVTCVVVDVSHEDPEVKENW | | NLAPSKNFHL | AASSLQS | GNSQESV |
| | KGRFTISR | YVDGVEVHNAKTKPREEQYN | | RPRDLISDIN | GVPSRFS | TEQDSKD |
| | DNSKNTLY | STYRVVSVLTVLHQDWLNGK | | VIVLELKGSE | GSGSGTD | STYSLSS |
| | LQMNSLRA | EYKCKVSNKALPAPIEKTIS | | TTFMCEYADE | FTLTISS | TLTLSKA |
| | EDTAVYYC | KAKGQPREPQVYTLPPSREE | | TATIVEFINR | LQPEDFA | DYEKHKV |
| | ARDRPYYY | MTKNQVSLTCLVKGFYPSDI | | WITFSQSIIS | TYYCQQY | YACEVTH |
| | YMDVWGKG | AVEWESNGQPENNYKTTPPV | | TLT (SEQ | KSYPVTF | QGLSSPV |
| | TTVTVSS | LDSDGSFFLYSKLTVDKSRW | | ID NO: 41) | GQGTKVE | TKSFNRG |
| | (SEQ ID | QQGNVFSCSVMHEALHNHYT | | | IK (SEQ | EC (SEQ |
| | NO: 591) | QKSLSLSPG (SEQ ID | | | ID NO: | ID NO: |
| | | NO: 44) | | | 1368) | 45) |
| MIAB | EVQLLESG | ASTKGPSVFPLAPSSKSTSG | GGGGS | APTSSSTKKT | DIQMTQS | RTVAAPS |
| 151 | GGLVQPGG | GTAALGCLVKDYFPEPVTVS | (SEQ | QLQLEHLLLD | PSSLSAS | VFIFPPS |
| | SLRLSCAA | WNSGALTSGVHTFPAVLQSS | ID NO: | LQMILNGINN | VGDRVTI | DEQLKSG |
| | SGFTFSDF | GLYSLSSVVTVPSSSLGTOT | 23) | YKNPKLTRML | TCRASOS | TASVVCL |
| | WMHWVRQA | YICNVNHKPSNTKVDKKVEP | | TFKFYMPKKA | ISRSLNW | LNNFYPR |
| | PGKGLEWI | KSCDKTHTCPPCPAPEAAGA | | TELKHLQCLE | YQQKPGK | EAKVQWK |
| | SYISGDSG | PSVFLFPPKPKDTLMISRTP | | EELKPLEEAL | APKLLIY | VDNALQS |
| | YTNYADSV | EVTCVVVDVSHEDPEVKENW | | NLAPSKNFHL | AASSLQS | GNSQESV |
| | KGRFTISR | YVDGVEVHNAKTKPREEQYN | | RPRDLISDIN | GVPSRFS | TEQDSKD |
| | DNSKNTLY | STYRVVSVLTVLHQDWLNGK | | VIVLELKGSE | GSGSGTD | STYSLSS |
| | LQMNSLRA | EYKCKVSNKALPAPIEKTIS | | TTFMCEYADE | FTLTISS | TLTLSKA |
| | EDTAVYYC | KAKGQPREPQVYTLPPSREE | | TATIVEFINR | LQPEDFA | DYEKHKV |
| | ARDRPYYY | MTKNQVSLTCLVKGFYPSDI | | WITFSQSIIS | TYYCQQY | YACEVTH |
| | YMDVWGKG | AVEWESNGQPENNYKTTPPV | | TLT (SEQ | KSYPVTF | QGLSSPV |
| | TTVTVSS | LDSDGSFFLYSKLTVDKSRW | | ID NO: 41) | GQGTKVE | TKSFNRG |
| | (SEQ ID | QQGNVFSCSVMHEALHNHYT | | | IK (SEQ | EC (SEQ |
| | NO: 591) | QKSLSLSPG (SEQ ID | | | ID NO: | ID NO: |
| | | NO: 44) | | | 1369) | 45) |
| MIAB | EVQLLESG | ASTKGPSVFPLAPSSKSTSG | GGGGS | APTSSSTKKT | DIQMTQS | RTVAAPS |
| 152 | GGLVQPGG | GTAALGCLVKDYFPEPVTVS | (SEQ | QLQLEHLLLD | PSSLSAS | VFIFPPS |
| | SLRLSCAA | WNSGALTSGVHTFPAVLQSS | ID NO: | LQMILNGINN | VGDRVTI | DEQLKSG |
| | SGFTFSDF | GLYSLSSVVTVPSSSLGTQT | 23) | YKNPKLTRML | TCRASQS | TASVVCL |
| | WMHWVRQA | YICNVNHKPSNTKVDKKVEP | | TFKFYMPKKA | VSSYLAW | LNNFYPR |
| | PGKGLEWI | KSCDKTHTCPPCPAPEAAGA | | TELKHLQCLE | YQQKPGK | EAKVQWK |
| | SYISGDSG | PSVFLFPPKPKDTLMISRTP | | EELKPLEEAL | APKLLIY | VDNALQS |
| | YTNYADSV | EVTCVVVDVSHEDPEVKENW | | NLAPSKNFHL | AASSLQS | GNSQESV |
| | KGRFTISR | YVDGVEVHNAKTKPREEQYN | | RPRDLISDIN | GVPSRFS | TEQDSKD |
| | DNSKNTLY | STYRVVSVLTVLHQDWLNGK | | VIVLELKGSE | GSGSGTD | STYSLSS |
| | LQMNSLRA | EYKCKVSNKALPAPIEKTIS | | TTFMCEYADE | FTLTISS | TLTLSKA |
| | EDTAVYYC | KAKGQPREPQVYTLPPSREE | | TATIVEFINR | LQPEDFA | DYEKHKV |
| | ARDRPYYY | MTKNQVSLTCLVKGFYPSDI | | WITFSQSIIS | TYYCOQY | YACEVTH |
| | YMDVWGKG | AVEWESNGQPENNYKTTPPV | | TLT (SEQ | KSYPVTF | QGLSSPV |
| | TTVTVSS | LDSDGSFFLYSKLTVDKSRW | | ID NO: 41) | GQGTKVE | TKSFNRG |
| | (SEQ ID | QQGNVFSCSVMHEALHNHYT | | | IK (SEQ | EC (SEQ |
| | NO: 591) | QKSLSLSPG (SEQ ID | | | ID NO: | ID NO: |
| | | NO: 44) | | | 1370) | 45) |
| MIAB | EVQLLESG | ASTKGPSVFPLAPSSKSTSG | GGGGS | APTSSSTKKT | DIQMTQS | RTVAAPS |
| 153 | GGLVQPGG | GTAALGCLVKDYFPEPVTVS | (SEQ | QLQLEHLLLD | PSSLSAS | VFIFPPS |
| | SLRLSCAA | WNSGALTSGVHTFPAVLQSS | ID NO: | LQMILNGINN | VGDRVTI | DEQLKSG |
| | SGFTFSDF | GLYSLSSVVTVPSSSLGTQT | 23) | YKNPKLTRML | TCRASQS | TASVVCL |
| | WMHWVRQA | YICNVNHKPSNTKVDKKVEP | | TFKFYMPKKA | VSSSLNW | LNNFYPR |
| | PGKGLEWI | KSCDKTHTCPPCPAPEAAGA | | TELKHLQCLE | YQQKPGK | EAKVQWK |
| | SYISGDSG | PSVFLFPPKPKDTLMISRTP | | EELKPLEEAL | APKLLIY | VDNALQS |
| | YTNYADSV | EVTCVVVDVSHEDPEVKENW | | NLAPSKNFHL | AASSLQS | GNSQESV |
| | KGRFTISR | YVDGVEVHNAKTKPREEQYN | | RPRDLISDIN | GVPSRFS | TEQDSKD |
| | DNSKNTLY | STYRVVSVLTVLHQDWLNGK | | VIVLELKGSE | GSGSGTD | STYSLSS |
| | LQMNSLRA | EYKCKVSNKALPAPIEKTIS | | TTFMCEYADE | FTLTISS | TLTLSKA |
| | EDTAVYYC | KAKGQPREPQVYTLPPSREE | | TATIVEFINR | LQPEDFA | DYEKHKV |
| | ARDRPYYY | MTKNQVSLTCLVKGFYPSDI | | WITFSQSIIS | TYYCQQY | YACEVTH |
| | YMDVWGKG | AVEWESNGQPENNYKTTPPV | | TLT (SEQ | KSYPVTF | QGLSSPV |
| | TTVTVSS | LDSDGSFFLYSKLTVDKSRW | | ID NO: 41) | GQGTKVE | TKSFNRG |
| | (SEQ ID | QQGNVFSCSVMHEALHNHYT | | | IK (SEQ | EC (SEQ |
| | NO: 591) | QKSLSLSPG (SEQ ID | | | ID NO: | ID NO: |
| | | NO: 44) | | | 1371) | 45) |
| MIAB | EVQLLESG | ASTKGPSVFPLAPSSKSTSG | GGGGS | APTSSSTKKT | DIQMTQS | RTVAAPS |
| 154 | GGLVQPGG | GTAALGCLVKDYFPEPVTVS | (SEQ | QLQLEHLLLD | PSSLSAS | VFIFPPS |
| | SLRLSCAA | WNSGALTSGVHTFPAVLQSS | ID NO: | LQMILNGINN | VGDRVTI | DEQLKSG |
| | SGFTFSDF | GLYSLSSVVTVPSSSLGTQT | 23) | YKNPKLTRML | TCRASQS | TASVVCL |
| | WMHWVRQA | YICNVNHKPSNTKVDKKVEP | | TFKFYMPKKA | VSRYLNW | LNNFYPR |
| | PGKGLEWI | KSCDKTHTCPPCPAPEAAGA | | TELKHLQCLE | YQQKPGK | EAKVQWK |
| | SYISGDSG | PSVFLFPPKPKDTLMISRTP | | EELKPLEEAL | APKLLIY | VDNALQS |
| | YTNYADSV | EVTCVVVDVSHEDPEVKENW | | NLAPSKNFHL | AASSLQS | GNSQESV |
| | KGRFTISR | YVDGVEVHNAKTKPREEQYN | | RPRDLISDIN | GVPSRFS | TEQDSKD |
| | DNSKNTLY | STYRVVSVLTVLHQDWLNGK | | VIVLELKGSE | GSGSGTD | STYSLSS |
| | LQMNSLRA | EYKCKVSNKALPAPIEKTIS | | TTFMCEYADE | FTLTISS | TLTLSKA |
| | EDTAVYYC | KAKGQPREPQVYTLPPSREE | | TATIVEFINR | LQPEDFA | DYEKHKV |
| | ARDRPYYY | MTKNQVSLTCLVKGFYPSDI | | WITFSQSIIS | TYYCQQY | YACEVTH |
| | YMDVWGKG | AVEWESNGQPENNYKTTPPV | | TLT (SEQ | KSYPVTF | QGLSSPV |
| | TTVTVSS | LDSDGSFFLYSKLTVDKSRW | | ID NO: 4: | GQGTKVE | TKSFNRG |
| | (SEQ ID | QQGNVFSCSVMHEALHNHYT | | | IK (SEQ | EC (SEQ |
| | NO: 591) | QKSLSLSPG SEQ ID | | | ID NO: | ID NO: |
| | | NO: 44) | | | 1372) | 45) |
| MIAB | EVQLLESG | ASTKGPSVFPLAPSSKSTSG | GGGGS | APTSSSTKKT | DIQMTQS | RTVAAPS |
| 155 | GGLVQPGG | GTAALGCLVKDYFPEPVTVS | (SEQ | QLQLEHLLLD | PSSLSAS | VFIFPPS |
| | SLRLSCAA | WNSGALTSGVHTFPAVLQSS | ID NO: | LQMILNGINN | VGDRVTI | DEQLKSG |
| | SGFTFSDF | GLYSLSSVVTVPSSSLGTQT | 23) | YKNPKLTRML | TCRASQS | TASVVCL |
| | WMHWVRQA | YICNVNHKPSNTKVDKKVEP | | TFKFYMPKKA | ISSSLNW | LNNFYPR |
| | PGKGLEWI | KSCDKTHTCPPCPAPEAAGA | | TELKHLQCLE | YQQKPGK | EAKVQWK |
| | SYISGDSG | PSVFLFPPKPKDTLMISRTP | | EELKPLEEAL | APKLLIY | VDNALQS |
| | YTNYADSV | EVTCVVVDVSHEDPEVKENW | | NLAPSKNFHL | AASSLQS | GNSQESV |
| | KGRFTISR | YVDGVEVHNAKTKPREEQYN | | RPRDLISDIN | GVPSRFS | TEQDSKD |
| | DNSKNTLY | STYRVVSVLTVLHQDWLNGK | | VIVLELKGSE | GSGSGTD | STYSLSS |
| | LQMNSLRA | EYKCKVSNKALPAPIEKTIS | | TTFMCEYADE | FTLTISS | TLTLSKA |
| | EDTAVYYC | KAKGQPREPQVYTLPPSREE | | TATIVEFINR | LQPEDFA | DYEKHKV |
| | ARDRPYYY | MTKNQVSLTCLVKGFYPSDI | | WITFSQSIIS | TYYCQQY | YACEVTH |
| | YMDVWGKG | AVEWESNGQPENNYKTTPPV | | TLT (SEQ | KSYPVTF | QGLSSPV |
| | TTVTVSS | LDSDGSFFLYSKLTVDKSRW | | ID NO: 41) | GQGTKVE | TKSFNRG |
| | (SEQ ID | QQGNVFSCSVMHEALHNHYT | | | IK (SEQ | EC (SEQ |
| | NO: 591) | QKSLSLSPG (SEQ ID | | | ID NO: | ID NO: |
| | | NO: 44) | | | 1373) | 45) |
| MIAB | EVQLLESG | ASTKGPSVFPLAPSSKSTSG | GGGGS | APTSSSTKKT | DIQMTQS | RTVAAPS |
| 156 | GGLVQPGG | GTAALGCLVKDYFPEPVTVS | (SEQ | QLQLEHLLLD | PSSLSAS | VFIFPPS |
| | SLRLSCAA | WNSGALTSGVHTFPAVLQSS | ID NO: | LQMILNGINN | VGDRVTI | DEQLKSG |
| | SGFTFSDF | GLYSLSSVVTVPSSSLGTQT | 23) | YKNPKLTRML | TCRASOS | TASVVCL |
| | WMHWVRQA | YICNVNHKPSNTKVDKKVEP | | TFKFYMPKKA | ISRYLNW | LNNFYPR |
| | PGKGLEWI | KSCDKTHTCPPCPAPEAAGA | | TELKHLQCLE | YQQKPGK | EAKVQWK |
| | SYISGDSG | PSVFLFPPKPKDTLMISRTP | | EELKPLEEAL | APKLLIY | VDNALQS |
| | YTNYADSV | EVTCVVVDVSHEDPEVKENW | | NLAPSKNFHL | AASSLQS | GNSQESV |
| | KGRFTISR | YVDGVEVHNAKTKPREEQYN | | RPRDLISDIN | GVPSRFS | TEQDSKD |
| | DNSKNTLY | STYRVVSVLTVLHQDWLNGK | | VIVLELKGSE | GSGSGTD | STYSLSS |
| | LQMNSLRA | EYKCKVSNKALPAPIEKTIS | | TTFMCEYADE | FTLTISS | TLTLSKA |
| | EDTAVYYC | KAKGQPREPQVYTLPPSREE | | TATIVEFINR | LQPEDFA | DYEKHKV |
| | ARDRPYYY | MTKNQVSLTCLVKGFYPSDI | | WITFSQSIIS | TYYCQQY | YACEVTH |
| | YMDVWGKG | AVEWESNGQPENNYKTTPPV | | TLT (SEQ | KSYPVTF | QGLSSPV |
| | TTVTVSS | LDSDGSFFLYSKLTVDKSRW | | ID NO: 41) | GQGTKVE | TKSFNRG |
| | (SEQ ID | QQGNVFSCSVMHEALHNHYT | | | IK (SEQ | EC (SEQ |
| | NO: 591) | QKSLSLSPG (SEQ ID | | | ID NO: | ID NO: |
| | | NO: 44) | | | 1374) | 45) |
| MIAB | EVQLLESG | ASTKGPSVFPLAPSSKSTSG | GGGGS | APTSSSTKKT | DIQMTQS | RTVAAPS |
| 157 | GGLVQPGG | GTAALGCLVKDYFPEPVTVS | (SEQ | QLQLEHLLLD | PSSLSAS | VFIFPPS |
| | SLRLSCAA | WNSGALTSGVHTFPAVLQSS | ID NO: | LQMILNGINN | VGDRVTI | DEQLKSG |
| | SGFTFSDF | GLYSLSSVVTVPSSSLGTQT | 23) | YKNPKLTRML | TCRASQS | TASVVCL |
| | WMHWVRQA | YICNVNHKPSNTKVDKKVEP | | TFKFYMPKKA | ISSYLAW | LNNFYPR |
| | PGKGLEWI | KSCDKTHTCPPCPAPEAAGA | | TELKHLQCLE | YQQKPGK | EAKVQWK |
| | SYISGDSG | PSVFLFPPKPKDTLMISRTP | | EELKPLEEAL | APKLLIY | VDNALQS |
| | YTNYADSV | EVTCVVVDVSHEDPEVKENW | | NLAPSKNFHL | AASSLQS | GNSQESV |
| | KGRFTISR | YVDGVEVHNAKTKPREEQYN | | RPRDLISDIN | GVPSRES | TEQDSKD |
| | DNSKNTLY | STYRVVSVLTVLHQDWLNGK | | VIVLELKGSE | GSGSGTD | STYSLSS |
| | LQMNSLRA | EYKCKVSNKALPAPIEKTIS | | TTFMCEYADE | FTLTISS | TLTLSKA |
| | EDTAVYYC | KAKGQPREPQVYTLPPSREE | | TATIVEFINR | LQPEDFA | DYEKHKV |
| | ARDRPYYY | MTKNQVSLTCLVKGFYPSDI | | WITFSQSIIS | TYYCQQY | YACEVTH |
| | YMDVWGKG | AVEWESNGQPENNYKTTPPV | | TLT (SEQ | KSYPVTF | QGLSSPV |
| | TTVTVSS | LDSDGSFFLYSKLTVDKSRW | | ID NO: 41) | GQGTKVE | TKSFNRG |
| | (SEQ ID | QQGNVFSCSVMHEALHNHYT | | | IK (SEQ | EC (SEQ |
| | NO: 591) | QKSLSLSPG (SEQ ID | | | ID NO: | ID NO: |
| | | NO: 44) | | | 1375) | 45) |
| MIAB | EVQLLESG | ASTKGPSVFPLAPSSKSTSG | GGGGS | APTSSSTKKT | DIQMTQS | RTVAAPS |
| 158 | GGLVQPGG | GTAALGCLVKDYFPEPVTVS | (SEQ | QLQLEHLLLD | PSSLSAS | VFIFPPS |
| | SLRLSCAA | WNSGALTSGVHTFPAVLQSS | ID NO: | LQMILNGINN | VGDRVTI | DEQLKSG |
| | SGFTFSDF | GLYSLSSVVTVPSSSLGTQT | 23) | YKNPKLTRML | TCRASQS | TASVVCL |
| | WMHWVRQA | YICNVNHKPSNTKVDKKVEP | | TFKFYMPKKA | VSSYLNW | LNNFYPR |
| | PGKGLEWI | KSCDKTHTCPPCPAPEAAGA | | TELKHLQCLE | YQQKPGK | EAKVQWK |
| | SYISGDSG | PSVFLFPPKPKDTLMISRTP | | EELKPLEEAL | APKLLIY | VDNALQS |
| | YTNYADSV | EVTCVVVDVSHEDPEVKENW | | NLAPSKNFHL | AASSLQS | GNSQESV |
| | KGRFTISR | YVDGVEVHNAKTKPREEQYN | | RPRDLISDIN | GVPSRES | TEQDSKD |
| | DNSKNTLY | STYRVVSVLTVLHQDWLNGK | | VIVLELKGSE | GSGSGTD | STYSLSS |
| | LQMNSLRA | EYKCKVSNKALPAPIEKTIS | | TTFMCEYADE | FTLTISS | TLTLSKA |
| | EDTAVYYC | KAKGQPREPQVYTLPPSREE | | TATIVEFINR | LQPEDFA | DYEKHKV |
| | ARDRPYYY | MTKNQVSLTCLVKGFYPSDI | | WITFSQSIIS | TYYCQQY | YACEVTH |
| | YMDVWGKG | AVEWESNGQPENNYKTTPPV | | TLT (SEQ | KSYPVTF | QGLSSPV |
| | TTVTVSS | LDSDGSFFLYSKLTVDKSRW | | ID NO: 41) | GQGTKVE | TKSFNRG |
| | (SEQ ID | QQGNVFSCSVMHEALHNHYT | | | IK (SEQ | EC (SEQ |
| | NO: 591) | QKSLSLSPG (SEQ ID | | | ID NO: | ID NO: |
| | | NO: 44) | | | 1376) | 45) |
| MIAB | EVQLLESG | ASTKGPSVFPLAPSSKSTSG | GGGGS | APTSSSTKKT | DIQMTQS | RTVAAPS |
| 159 | GGLVQPGG | GTAALGCLVKDYFPEPVTVS | (SEQ | QLQLEHLLLD | PSSLSAS | VFIFPPS |
| | SLRLSCAA | WNSGALTSGVHTFPAVLQSS | ID NO: | LQMILNGINN | VGDRVTI | DEQLKSG |
| | SGFTFSDF | GLYSLSSVVTVPSSSLGTQT | 23) | YKNPKLTRML | TCRASQS | TASVVCL |
| | WMHWVRQA | YICNVNHKPSNTKVDKKVEP | | TFKFYMPKKA | VSRSLAW | LNNFYPR |
| | PGKGLEWI | KSCDKTHTCPPCPAPEAAGA | | TELKHLQCLE | YQQKPGK | EAKVQWK |
| | SYISGESG | PSVFLFPPKPKDTLMISRTP | | EELKPLEEAL | APKLLIY | VDNALQS |
| | YTNYADSV | EVTCVVVDVSHEDPEVKENW | | NLAPSKNFHL | AASSLQS | GNSQESV |
| | KGRFTISR | YVDGVEVHNAKTKPREEQYN | | RPRDLISDIN | GVPSRFS | TEQDSKD |
| | DNSKNTLY | STYRVVSVLTVLHQDWLNGK | | VIVLELKGSE | GSGSGTD | STYSLSS |
| | LQMNSLRA | EYKCKVSNKALPAPIEKTIS | | TTFMCEYADE | FTLTISS | TLTLSKA |
| | EDTAVYYC | KAKGQPREPQVYTLPPSREE | | TATIVEFINR | LQPEDFA | DYEKHKV |
| | ARDRPYYY | MTKNQVSLTCLVKGFYPSDI | | WITFSQSIIS | TYYCQQY | YACEVTH |
| | YMDVWGKG | AVEWESNGQPENNYKTTPPV | | TLT (SEQ | KSYPVTF | QGLSSPV |
| | TTVTVSS | LDSDGSFFLYSKLTVDKSRW | | ID NO: 41) | GQGTKVE | TKSFNRG |
| | (SEQ ID | QQGNVFSCSVMHEALHNHYT | | | IK (SEQ | EC (SEQ |
| | NO: | QKSLSLSPG SEQ ID | | | ID NO: | ID NO: |
| | 1377) | NO: 44) | | | 592) | 45) |
| MIAB | EVQLLESG | ASTKGPSVFPLAPSSKSTSG | GGGGS | APTSSSTKKT | DIQMTQS | RTVAAPS |
| 160 | GGLVQPGG | GTAALGCLVKDYFPEPVTVS | (SEQ | QLQLEHLLLD | PSSLSAS | VFIFPPS |
| | SLRLSCAA | WNSGALTSGVHTFPAVLQSS | ID NO: | LQMILNGINN | VGDRVTI | DEQLKSG |
| | SGFTFSDF | GLYSLSSVVTVPSSSLGTQT | 23) | YKNPKLTRML | TCRASQS | TASVVCL |
| | WMHWVRQA | YICNVNHKPSNTKVDKKVEP | | TFKFYMPKKA | VSRSLAW | LNNFYPR |
| | PGKGLEWI | KSCDKTHTCPPCPAPEAAGA | | TELKHLQCLE | YQQKPGK | EAKVQWK |
| | SYISGDSG | PSVFLFPPKPKDTLMISRTP | | EELKPLEEAL | APKLLIY | VDNALQS |
| | YTQYADSV | EVTCVVVDVSHEDPEVKENW | | NLAPSKNFHL | AASSLQS | GNSQESV |
| | KGRFTISR | YVDGVEVHNAKTKPREEQYN | | RPRDLISDIN | GVPSRFS | TEQDSKD |
| | DNSKNTLY | STYRVVSVLTVLHQDWLNGK | | VIVLELKGSE | GSGSGTD | STYSLSS |
| | LQMNSLRA | EYKCKVSNKALPAPIEKTIS | | TTFMCEYADE | FTLTISS | TLTLSKA |
| | EDTAVYYC | KAKGQPREPQVYTLPPSREE | | TATIVEFINR | LQPEDFA | DYEKHKV |
| | ARDRPYYY | MTKNQVSLTCLVKGFYPSDI | | WITFSQSIIS | TYYCQQY | YACEVTH |
| | YMDVWGKG | AVEWESNGQPENNYKTTPPV | | TLT (SEQ | KSYPVTF | QGLSSPV |
| | TTVTVSS | LDSDGSFFLYSKLTVDKSRW | | ID NO: 41) | GQGTKVE | TKSFNRG |
| | (SEQ ID | QQGNVFSCSVMHEALHNHYT | | | IK (SEQ | EC (SEQ |
| | NO: | QKSLSLSPG (SEQ ID | | | ID NO: | ID NO: |
| | 1378) | NO: 44) | | | 592) | 45) |
| MIAB | EVQLLESG | ASTKGPSVFPLAPSSKSTSG | GGGGS | APTSSSTKKT | DIQMTQS | RTVAAPS |
| 161 | GGLVQPGG | GTAALGCLVKDYFPEPVTVS | (SEQ | QLQLEHLLLD | PSSLSAS | VFIFPPS |
| | SLRLSCAA | WNSGALTSGVHTFPAVLQSS | ID NO: | LQMILNGINN | VGDRVTI | DEQLKSG |
| | SGFTFSDF | GLYSLSSVVTVPSSSLGTQT | 23) | YKNPKLTRML | TCRASOS | TASVVCL |
| | WMHWVRQA | YICNVNHKPSNTKVDKKVEP | | TFKFYMPKKA | VSRSLAW | LNNFYPR |
| | PGKGLEWI | KSCDKTHTCPPCPAPEAAGA | | TELKHLQCLE | YQQKPGK | EAKVQWK |
| | SYISGDSG | PSVFLFPPKPKDTLMISRTP | | EELKPLEEAL | APKLLIY | VDNALQS |
| | YTNYADSV | EVTCVVVDVSHEDPEVKENW | | NLAPSKNFHL | AASSLQS | GNSQESV |
| | KGRFTISR | YVDGVEVHNAKTKPREEQYN | | RPRDLISDIN | GVPSRFS | TEQDSKD |
| | DQSKNTLY | STYRVVSVLTVLHQDWLNGK | | VIVLELKGSE | GSGSGTD | STYSLSS |
| | LQMNSLRA | EYKCKVSNKALPAPIEKTIS | | TTFMCEYADE | FTLTISS | TLTLSKA |
| | EDTAVYYC | KAKGQPREPQVYTLPPSREE | | TATIVEFINR | LQPEDFA | DYEKHKV |
| | ARDRPYYY | MTKNQVSLTCLVKGFYPSDI | | WITFSQSIIS | TYYCQQY | YACEVTH |
| | YMDVWGKG | AVEWESNGQPENNYKTTPPV | | TLT (SEQ | KSYPVTF | QGLSSPV |
| | TTVTVSS | LDSDGSFFLYSKLTVDKSRW | | ID NO: 41) | GQGTKVE | TKSFNRG |
| | (SEQ ID | QQGNVFSCSVMHEALHNHYT | | | IK (SEQ | EC (SEQ |
| | NO: | QKSLSLSPG (SEQ ID | | | ID NO: | ID NO: |
| | 1379) | NO: 44) | | | 592) | 45) |
| MIAB | EVQLLESG | ASTKGPSVFPLAPSSKSTSG | GGGGS | APTSSSTKKT | DIQMTQS | RTVAAPS |
| 162 | GGLVQPGG | GTAALGCLVKDYFPEPVTVS | (SEQ | QLQLEHLLLD | PSSLSAS | VFIFPPS |
| | SLRLSCAA | WNSGALTSGVHTFPAVLQSS | ID NO: | LQMILNGINN | VGDRVTI | DEQLKSG |
| | SGFTFSDF | GLYSLSSVVTVPSSSLGTQT | 23) | YKNPKLTRML | TCRASQS | TASVVCL |
| | WMHWVRQA | YICNVNHKPSNTKVDKKVEP | | TFKFYMPKKA | VSRSLGW | LNNFYPR |
| | PGKGLEWI | KSCDKTHTCPPCPAPEAAGA | | TELKHLQCLE | YQQKPGK | EAKVQWK |
| | SYISGDSG | PSVFLFPPKPKDTLMISRTP | | EELKPLEEAL | APKLLIY | VDNALQS |
| | YTNYADSV | EVTCVVVDVSHEDPEVKENW | | NLAPSKNFHL | AASSLQS | GNSQESV |
| | KGRFTISR | YVDGVEVHNAKTKPREEQYN | | RPRDLISDIN | GVPSRES | TEQDSKD |
| | DNSKNTLY | STYRVVSVLTVLHQDWLNGK | | VIVLELKGSE | GSGSGTD | STYSLSS |
| | LQMNSLRA | EYKCKVSNKALPAPIEKTIS | | TTFMCEYADE | FTLTISS | TLTLSKA |
| | EDTAVYYC | KAKGQPREPQVYTLPPSREE | | TATIVEFINR | LQPEDFA | DYEKHKV |
| | ARDRPYYY | MTKNQVSLTCLVKGFYPSDI | | WITFSQSIIS | TYYCQQY | YACEVTH |
| | YMDVWGKG | AVEWESNGQPENNYKTTPPV | | TLT (SEQ | KSYPVTF | QGLSSPV |
| | TTVTVSS | LDSDGSFFLYSKLTVDKSRW | | ID NO: 41) | GQGTKVE | TKSFNRG |
| | (SEQ ID | QQGNVFSCSVMHEALHNHYT | | | IK (SEQ | EC (SEQ |
| | NO: 591) | QKSLSLSPG (SEQ ID | | | ID NO: | ID NO: |
| | | NO: 44) | | | 1380) | 45) |
| MIAB | EVQLLESG | ASTKGPSVFPLAPSSKSTSG | GGGGS | APTSSSTKKT | DIQMTQS | RTVAAPS |
| 163 | GGLVQPGG | GTAALGCLVKDYFPEPVTVS | (SEQ | QLQLEHLLLD | PSSLSAS | VFIFPPS |
| | SLRLSCAA | WNSGALTSGVHTFPAVLQSS | ID NO: | LQMILNGINN | VGDRVTI | DEQLKSG |
| | SGFTFSDF | GLYSLSSVVTVPSSSLGTQT | 23) | YKNPKLTRML | TCRASQS | TASVVCL |
| | WMHWVRQA | YICNVNHKPSNTKVDKKVEP | | TFKFYMPKKA | VSRSLDW | LNNFYPR |
| | PGKGLEWI | KSCDKTHTCPPCPAPEAAGA | | TELKHLQCLE | YQQKPGK | EAKVQWK |
| | SYISGDSG | PSVFLFPPKPKDTLMISRTP | | EELKPLEEAL | APKLLIY | VDNALQS |
| | YTNYADSV | EVTCVVVDVSHEDPEVKENW | | NLAPSKNFHL | AASSLQS | GNSQESV |
| | KGRFTISR | YVDGVEVHNAKTKPREEQYN | | RPRDLISDIN | GVPSRFS | TEQDSKD |
| | DNSKNTLY | STYRVVSVLTVLHQDWLNGK | | VIVLELKGSE | GSGSGTD | STYSLSS |
| | LQMNSLRA | EYKCKVSNKALPAPIEKTIS | | TTFMCEYADE | FTLTISS | TLTLSKA |
| | EDTAVYYC | KAKGQPREPQVYTLPPSREE | | TATIVEFINR | LQPEDFA | DYEKHKV |
| | ARDRPYYY | MTKNQVSLTCLVKGFYPSDI | | WITFSQSIIS | TYYCQQY | YACEVTH |
| | YMDVWGKG | AVEWESNGQPENNYKTTPPV | | TLT (SEQ | KSYPVTF | QGLSSPV |
| | TTVTVSS | LDSDGSFFLYSKLTVDKSRW | | ID NO: 41) | GQGTKVE | TKSFNRG |
| | (SEQ ID | QQGNVFSCSVMHEALHNHYT | | | IK (SEQ | EC (SEQ |
| | NO: 591) | QKSLSLSPG (SEQ ID | | | ID NO: | ID NO: |
| | | NO: 44) | | | 1381) | 45) |
| MIAB | EVQLLESG | ASTKGPSVFPLAPSSKSTSG | GGGGS | APTSSSTKKT | DIQMTQS | RTVAAPS |
| 164 | GGLVQPGG | GTAALGCLVKDYFPEPVTVS | (SEQ | QLQLEHLLLD | PSSLSAS | VFIFPPS |
| | SLRLSCAA | WNSGALTSGVHTFPAVLQSS | ID NO: | LQMILNGINN | VGDRVTI | DEQLKSG |
| | SGFTFSDF | GLYSLSSVVTVPSSSLGTQT | 23) | YKNPKLTRML | TCRASOS | TASVVCL |
| | WMHWVRQA | YICNVNHKPSNTKVDKKVEP | | TFKFYMPKKA | VSRSLTW | LNNFYPR |
| | PGKGLEWI | KSCDKTHTCPPCPAPEAAGA | | TELKHLQCLE | YQQKPGK | EAKVQWK |
| | SYISGDSG | PSVFLFPPKPKDTLMISRTP | | EELKPLEEAL | APKLLIY | VDNALQS |
| | YTNYADSV | EVTCVVVDVSHEDPEVKENW | | NLAPSKNFHL | AASSLQS | GNSQESV |
| | KGRFTISR | YVDGVEVHNAKTKPREEQYN | | RPRDLISDIN | GVPSRES | TEQDSKD |
| | DNSKNTLY | STYRVVSVLTVLHQDWLNGK | | VIVLELKGSE | GSGSGTD | STYSLSS |
| | LQMNSLRA | EYKCKVSNKALPAPIEKTIS | | TTFMCEYADE | FTLTISS | TLTLSKA |
| | EDTAVYYC | KAKGQPREPQVYTLPPSREE | | TATIVEFINR | LQPEDFA | DYEKHKV |
| | ARDRPYYY | MTKNQVSLTCLVKGFYPSDI | | WITFSQSIIS | TYYCQQY | YACEVTH |
| | YMDVWGKG | AVEWESNGQPENNYKTTPPV | | TLT (SEQ | KSYPVTF | QGLSSPV |
| | TTVTVSS | LDSDGSFFLYSKLTVDKSRW | | ID NO: 41) | GQGTKVE | TKSFNRG |
| | (SEQ ID | QQGNVFSCSVMHEALHNHYT | | | IK (SEQ | EC (SEQ |
| | NO: 591) | QKSLSLSPG (SEQ ID | | | ID NO: | ID NO: |
| | | NO: 44) | | | 1382) | 45) |
| MIAB | EVQLLESG | ASTKGPSVFPLAPSSKSTSG | GGGGS | APTSSSTKKT | DIQMTQS | RTVAAPS |
| 165 | GGLVQPGG | GTAALGCLVKDYFPEPVTVS | (SEQ | QLQLEHLLLD | PSSLSAS | VFIFPPS |
| | SLRLSCAA | WNSGALTSGVHTFPAVLQSS | ID NO: | LQMILNGINN | VGDRVTI | DEQLKSG |
| | SGFTFSDF | GLYSLSSVVTVPSSSLGTQT | 23) | YKNPKLTRML | TCRASQS | TASVVCL |
| | WMHWVRQA | YICNVNHKPSNTKVDKKVEP | | TFKFYMPKKA | VSRSLSW | LNNFYPR |
| | PGKGLEWI | KSCDKTHTCPPCPAPEAAGA | | TELKHLQCLE | YQQKPGK | EAKVQWK |
| | SYISGDSG | PSVFLFPPKPKDTLMISRTP | | EELKPLEEAL | APKLLIY | VDNALQS |
| | YTNYADSV | EVTCVVVDVSHEDPEVKENW | | NLAPSKNFHL | AASSLQS | GNSQESV |
| | KGRFTISR | YVDGVEVHNAKTKPREEQYN | | RPRDLISDIN | GVPSRES | TEQDSKD |
| | DNSKNTLY | STYRVVSVLTVLHQDWLNGK | | VIVLELKGSE | GSGSGTD | STYSLSS |
| | LQMNSLRA | EYKCKVSNKALPAPIEKTIS | | TTFMCEYADE | FTLTISS | TLTLSKA |
| | EDTAVYYC | KAKGQPREPQVYTLPPSREE | | TATIVEFINR | LQPEDFA | DYEKHKV |
| | ARDRPYYY | MTKNQVSLTCLVKGFYPSDI | | WITFSQSIIS | TYYCQQY | YACEVTH |
| | YMDVWGKG | AVEWESNGQPENNYKTTPPV | | TLT (SEQ | KSYPVTF | QGLSSPV |
| | TTVTVSS | LDSDGSFFLYSKLTVDKSRW | | ID NO: 41) | GQGTKVE | TKSFNRG |
| | (SEQ ID | QQGNVFSCSVMHEALHNHYT | | | IK (SEQ | EC (SEQ |
| | NO: 591) | QKSLSLSPG (SEQ ID | | | ID NO: | ID NO: |
| | | NO: 44) | | | 1383) | 45) |
| MIAB | EVQLLESG | ASTKGPSVFPLAPSSKSTSG | GGGGS | APTSSSTKKT | DIQMTQS | RTVAAPS |
| 166 | GGLVQPGG | GTAALGCLVKDYFPEPVTVS | (SEQ | QLQLEHLLLD | PSSLSAS | VFIFPPS |
| | SLRLSCAA | WNSGALTSGVHTFPAVLQSS | ID NO: | LQMILNGINN | VGDRVTI | DEQLKSG |
| | SGFTFSDF | GLYSLSSVVTVPSSSLGTQT | 23) | YKNPKLTRML | TCRASOS | TASVVCL |
| | WMHWVRQA | YICNVNHKPSNTKVDKKVEP | | TFKFYMPKKA | VSRSLEW | LNNFYPR |
| | PGKGLEWI | KSCDKTHTCPPCPAPEAAGA | | TELKHLQCLE | YQQKPGK | EAKVQWK |
| | SYISGDSG | PSVFLFPPKPKDTLMISRTP | | EELKPLEEAL | APKLLIY | VDNALQS |
| | YTNYADSV | EVTCVVVDVSHEDPEVKENW | | NLAPSKNFHL | AASSLQS | GNSQESV |
| | KGRFTISR | YVDGVEVHNAKTKPREEQYN | | RPRDLISDIN | GVPSRFS | TEQDSKD |
| | DNSKNTLY | STYRVVSVLTVLHQDWLNGK | | VIVLELKGSE | GSGSGTD | STYSLSS |
| | LQMNSLRA | EYKCKVSNKALPAPIEKTIS | | TTFMCEYADE | FTLTISS | TLTLSKA |
| | EDTAVYYC | KAKGQPREPQVYTLPPSREE | | TATIVEFINR | LQPEDFA | DYEKHKV |
| | ARDRPYYY | MTKNQVSLTCLVKGFYPSDI | | WITFSQSIIS | TYYCQQY | YACEVTH |
| | YMDVWGKG | AVEWESNGQPENNYKTTPPV | | TLT (SEQ | KSYPVTF | QGLSSPV |
| | TTVTVSS | LDSDGSFFLYSKLTVDKSRW | | ID NO: 41) | GQGTKVE | TKSFNRG |
| | (SEQ ID | QQGNVFSCSVMHEALHNHYT | | | IK (SEQ | EC (SEQ |
| | NO: 591) | QKSLSLSPG (SEQ ID | | | ID NO: | ID NO: |
| | | NO: 44) | | | 1384) | 45) |
| MIAB | EVQLLESG | ASTKGPSVFPLAPSSKSTSG | GGGGS | APTSSSTKKT | DIQMTQS | RTVAAPS |
| 167 | GGLVQPGG | GTAALGCLVKDYFPEPVTVS | (SEQ | QLQLEHLLLD | PSSLSAS | VFIFPPS |
| | SLRLSCAA | WNSGALTSGVHTFPAVLQSS | ID NO: | LQMILNGINN | VGDRVTI | DEQLKSG |
| | SGFTFSDF | GLYSLSSVVTVPSSSLGTQT | 23) | YKNPKLTRML | TCRASQS | TASVVCL |
| | WMHWVRQA | YICNVNHKPSNTKVDKKVEP | | TFKFYMPKKA | VSRSLKW | LNNFYPR |
| | PGKGLEWI | KSCDKTHTCPPCPAPEAAGA | | TELKHLQCLE | YQQKPGK | EAKVQWK |
| | SYISGDSG | PSVFLFPPKPKDTLMISRTP | | EELKPLEEAL | APKLLIY | VDNALQS |
| | YTNYADSV | EVTCVVVDVSHEDPEVKENW | | NLAPSKNFHL | AASSLQS | GNSQESV |
| | KGRFTISR | YVDGVEVHNAKTKPREEQYN | | RPRDLISDIN | GVPSRES | TEQDSKD |
| | DNSKNTLY | STYRVVSVLTVLHQDWLNGK | | VIVLELKGSE | GSGSGTD | STYSLSS |
| | LQMNSLRA | EYKCKVSNKALPAPIEKTIS | | TTFMCEYADE | FTLTISS | TLTLSKA |
| | EDTAVYYC | KAKGQPREPQVYTLPPSREE | | TATIVEFINR | LQPEDFA | DYEKHKV |
| | ARDRPYYY | MTKNQVSLTCLVKGFYPSDI | | WITFSQSIIS | TYYCQQY | YACEVTH |
| | YMDVWGKG | AVEWESNGQPENNYKTTPPV | | TLT (SEQ | KSYPVTF | QGLSSPV |
| | TTVTVSS | LDSDGSFFLYSKLTVDKSRW | | ID NO: 41) | GQGTKVE | TKSFNRG |
| | (SEQ ID | QQGNVFSCSVMHEALHNHYT | | | IK (SEQ | EC (SEQ |
| | NO: 591) | QKSLSLSPG (SEQ ID | | | ID NO: | ID NO: |
| | | NO: 44) | | | 1385) | 45) |
| MIAB | EVQLLESG | ASTKGPSVFPLAPSSKSTSG | GGGGS | APTSSSTKKT | DIQMTQS | RTVAAPS |
| 168 | GGLVQPGG | GTAALGCLVKDYFPEPVTVS | (SEQ | QLQLEHLLLD | PSSLSAS | VFIFPPS |
| | SLRLSCAA | WNSGALTSGVHTFPAVLQSS | ID NO: | LQMILNGINN | VGDRVTI | DEQLKSG |
| | SGFTFSDF | GLYSLSSVVTVPSSSLGTQT | 23) | YKNPKLTRML | TCRASQS | TASVVCL |
| | WMHWVRQA | YICNVNHKPSNTKVDKKVEP | | TFKFYMPKKA | VSRSLLW | LNNFYPR |
| | PGKGLEWI | KSCDKTHTCPPCPAPEAAGA | | TELKHLQCLE | YQQKPGK | EAKVQWK |
| | SYISGDSG | PSVFLFPPKPKDTLMISRTP | | EELKPLEEAL | APKLLIY | VDNALQS |
| | YTNYADSV | EVTCVVVDVSHEDPEVKENW | | NLAPSKNFHL | AASSLQS | GNSQESV |
| | KGRFTISR | YVDGVEVHNAKTKPREEQYN | | RPRDLISDIN | GVPSRES | TEQDSKD |
| | DNSKNTLY | STYRVVSVLTVLHQDWLNGK | | VIVLELKGSE | GSGSGTD | STYSLSS |
| | LQMNSLRA | EYKCKVSNKALPAPIEKTIS | | TTFMCEYADE | FTLTISS | TLTLSKA |
| | EDTAVYYC | KAKGQPREPQVYTLPPSREE | | TATIVEFINR | LQPEDFA | DYEKHKV |
| | ARDRPYYY | MTKNQVSLTCLVKGFYPSDI | | WITFSQSIIS | TYYCQQY | YACEVTH |
| | YMDVWGKG | AVEWESNGOPENNYKTTPPV | | TLT (SEQ | KSYPVTF | QGLSSPV |
| | TTVTVSS | LDSDGSFFLYSKLTVDKSRW | | ID NO: 41) | GQGTKVE | TKSFNRG |
| | (SEQ ID | QQGNVFSCSVMHEALHNHYT | | | IK (SEQ | EC (SEQ |
| | NO: 591) | QKSLSLSPG (SEQ ID | | | ID NO: | ID NO: |
| | | NO: 44) | | | 1386) | 45) |
| MIAB | EVQLLESG | ASTKGPSVFPLAPSSKSTSG | GGGGS | APTSSSTKKT | DIQMTQS | RTVAAPS |
| 169 | GGLVQPGG | GTAALGCLVKDYFPEPVTVS | (SEQ | QLQLEHLLLD | PSSLSAS | VFIFPPS |
| | SLRLSCAA | WNSGALTSGVHTFPAVLQSS | ID NO: | LQMILNGINN | VGDRVTI | DEQLKSG |
| | SGFTFSDF | GLYSLSSVVTVPSSSLGTQT | 23) | YKNPKLTRML | TCRASQS | TASVVCL |
| | WMHWVRQA | YICNVNHKPSNTKVDKKVEP | | TFKFYMPKKA | VSRSLAW | LNNFYPR |
| | PGKGLEWI | KSCDKTHTCPPCPAPEAAGA | | TELKHLQCLE | YQQKPGK | EAKVQWK |
| | SYISGDSG | PSVFLFPPKPKDTLMISRTP | | EELKPLEEAL | APKLLIY | VDNALQS |
| | YTNYADSV | EVTCVVVDVSHEDPEVKENW | | NLAPSKNFHL | AASSLQS | GNSQESV |
| | KGRFTISR | YVDGVEVHNAKTKPREEQYN | | RPRDLISDIN | GVPSRFS | TEQDSKD |
| | DNSKNTLY | STYRVVSVLTVLHQDWLNGK | | VIVLELKGSE | GSGSGTD | STYSLSS |
| | LQMNSLRA | EYKCKVSNKALPAPIEKTIS | | TTFMCEYADE | FTLTISS | TLTLSKA |
| | EDTAVYYC | KAKGQPREPQVYTLPPSREE | | TATIVEFINR | LQPEDFA | DYEKHKV |
| | ARDRPYYY | MTKNQVSLTCLVKGFYPSDI | | WITFSQSIIS | TYYCQQY | YACEVTH |
| | IMDVWGKG | AVEWESNGQPENNYKTTPPV | | TLT (SEQ | KSYPVTF | QGLSSPV |
| | TTVTVSS | LDSDGSFFLYSKLTVDKSRW | | ID NO: 41) | GQGTKVE | TKSFNRG |
| | (SEQ ID | QQGNVFSCSVMHEALHNHYT | | | IK (SEQ | EC (SEQ |
| | NO: | QKSLSLSPG (SEQ ID | | | ID NO: | ID NO: |
| | 1387) | NO: 44) | | | 592) | 45) |
| MIAB | EVQLLESG | ASTKGPSVFPLAPSSKSTSG | GGGGS | APTSSSTKKT | DIQMTQS | RTVAAPS |
| 170 | GGLVQPGG | GTAALGCLVKDYFPEPVTVS | (SEQ | QLQLEHLLLD | PSSLSAS | VFIFPPS |
| | SLRLSCAA | WNSGALTSGVHTFPAVLQSS | ID NO: | LQMILNGINN | VGDRVTI | DEQLKSG |
| | SGFTFSDF | GLYSLSSVVTVPSSSLGTQT | 23) | YKNPKLTRML | TCRASOS | TASVVCL |
| | WMHWVRQA | YICNVNHKPSNTKVDKKVEP | | TFKFYMPKKA | VSRSLAW | LNNFYPR |
| | PGKGLEWI | KSCDKTHTCPPCPAPEAAGA | | TELKHLQCLE | YQQKPGK | EAKVQWK |
| | SYISGDSG | PSVFLFPPKPKDTLMISRTP | | EELKPLEEAL | APKLLIY | VDNALQS |
| | YTNYADSV | EVTCVVVDVSHEDPEVKENW | | NLAPSKNFHL | AASSLQS | GNSQESV |
| | KGRFTISR | YVDGVEVHNAKTKPREEQYN | | RPRDLISDIN | GVPSRFS | TEQDSKD |
| | DNSKNTLY | STYRVVSVLTVLHQDWLNGK | | VIVLELKGSE | GSGSGTD | STYSLSS |
| | LQMNSLRA | EYKCKVSNKALPAPIEKTIS | | TTFMCEYADE | FTLTISS | TLTLSKA |
| | EDTAVYYC | KAKGQPREPQVYTLPPSREE | | TATIVEFINR | LQPEDFA | DYEKHKV |
| | ARDRPYYY | MTKNQVSLTCLVKGFYPSDI | | WITFSQSIIS | TYYCQQY | YACEVTH |
| | WMDVWGKG | AVEWESNGQPENNYKTTPPV | | TLT (SEQ | KSYPVTF | QGLSSPV |
| | TTVTVSS | LDSDGSFFLYSKLTVDKSRW | | ID NO: 41) | GQGTKVE | TKSFNRG |
| | (SEQ ID | QQGNVFSCSVMHEALHNHYT | | | IK (SEQ | EC (SEQ |
| | NO: | QKSLSLSPG (SEQ ID | | | ID NO: | ID NO: |
| | 1388) | NO: 44) | | | 592) | 45) |
| MIAB | EVQLLESG | ASTKGPSVFPLAPSSKSTSG | GGGGS | APTSSSTKKT | DIQMTQS | RTVAAPS |
| 171 | GGLVQPGG | GTAALGCLVKDYFPEPVTVS | (SEQ | QLQLEHLLLD | PSSLSAS | VFIFPPS |
| | SLRLSCAA | WNSGALTSGVHTFPAVLQSS | ID NO: | LQMILNGINN | VGDRVTI | DEQLKSG |
| | SGFTFSDF | GLYSLSSVVTVPSSSLGTQT | 23) | YKNPKLTRML | TCRASQS | TASVVCL |
| | WMHWVRQA | YICNVNHKPSNTKVDKKVEP | | TFKFYMPKKA | VSRSLAW | LNNFYPR |
| | PGKGLEWI | KSCDKTHTCPPCPAPEAAGA | | TELKHLQCLE | YQQKPGK | EAKVQWK |
| | SYISGDSG | PSVFLFPPKPKDTLMISRTP | | EELKPLEEAL | APKLLIY | VDNALQS |
| | YTNYADSV | EVTCVVVDVSHEDPEVKENW | | NLAPSKNFHL | AASSLQS | GNSQESV |
| | KGRFTISR | YVDGVEVHNAKTKPREEQYN | | RPRDLISDIN | GVPSRFS | TEQDSKD |
| | DNSKNTLY | STYRVVSVLTVLHQDWLNGK | | VIVLELKGSE | GSGSGTD | STYSLSS |
| | LQMNSLRA | EYKCKVSNKALPAPIEKTIS | | TTFMCEYADE | FTLTISS | TLTLSKA |
| | EDTAVYYC | KAKGQPREPQVYTLPPSREE | | TATIVEFINR | LQPEDFA | DYEKHKV |
| | ARDRPSYY | MTKNQVSLTCLVKGFYPSDI | | WITFSQSIIS | TYYCQQY | YACEVTH |
| | YMDVWGKG | AVEWESNGQPENNYKTTPPV | | TLT (SEQ | KSYPVTF | QGLSSPV |
| | TTVTVSS | LDSDGSFFLYSKLTVDKSRW | | ID NO: 41) | GQGTKVE | TKSFNRG |
| | (SEQ ID | QQGNVFSCSVMHEALHNHYT | | | IK (SEQ | EC (SEQ |
| | NO: | QKSLSLSPG (SEQ ID | | | ID NO: | ID NO: |
| | 1389) | NO: 44) | | | 592) | 45) |
| MIAB | EVQLLESG | ASTKGPSVFPLAPSSKSTSG | GGGGS | APTSSSTKKT | DIQMTQS | RTVAAPS |
| 172 | GGLVQPGG | GTAALGCLVKDYFPEPVTVS | (SEQ | QLQLEHLLLD | PSSLSAS | VFIFPPS |
| | SLRLSCAA | WNSGALTSGVHTFPAVLQSS | ID NO: | LQMILNGINN | VGDRVTI | DEQLKSG |
| | SGFTFSDF | GLYSLSSVVTVPSSSLGTQT | 23) | YKNPKLTRML | TCRASQS | TASVVCL |
| | WMHWVRQA | YICNVNHKPSNTKVDKKVEP | | TFKFYMPKKA | VSRSLAW | LNNFYPR |
| | PGKGLEWI | KSCDKTHTCPPCPAPEAAGA | | TELKHLQCLE | YQQKPGK | EAKVQWK |
| | SYISGDSG | PSVFLFPPKPKDTLMISRTP | | EELKPLEEAL | APKLLIY | VDNALQS |
| | YTNYADSV | EVTCVVVDVSHEDPEVKENW | | NLAPSKNFHL | AASSLQS | GNSQESV |
| | KGRFTISR | YVDGVEVHNAKTKPREEQYN | | RPRDLISDIN | GVPSRFS | TEQDSKD |
| | DNSKNTLY | STYRVVSVLTVLHQDWLNGK | | VIVLELKGSE | GSGSGTD | STYSLSS |
| | LQMNSLRA | EYKCKVSNKALPAPIEKTIS | | TTFMCEYADE | FTLTISS | TLTLSKA |
| | EDTAVYYC | KAKGQPREPQVYTLPPSREE | | TATIVEFINR | LQPEDFA | DYEKHKV |
| | ARDRPTYY | MTKNQVSLTCLVKGFYPSDI | | WITFSQSIIS | TYYCQQY | YACEVTH |
| | YMDVWGKG | AVEWESNGQPENNYKTTPPV | | TLT (SEQ | KSYPVTF | QGLSSPV |
| | TTVTVSS | LDSDGSFFLYSKLTVDKSRW | | ID NO: 41) | GQGTKVE | TKSFNRG |
| | (SEQ ID | QQGNVFSCSVMHEALHNHYT | | | IK (SEQ | EC (SEQ |
| | NO: | QKSLSLSPG (SEQ ID | | | ID NO: | ID NO: |
| | 1390) | NO: 44) | | | 592) | 45) |
| MIAB | EVQLLESG | ASTKGPSVFPLAPSSKSTSG | GGGGS | APTSSSTKKT | DIQMTQS | RTVAAPS |
| 173 | GGLVQPGG | GTAALGCLVKDYFPEPVTVS | (SEQ | QLQLEHLLLD | PSSLSAS | VFIFPPS |
| | SLRLSCAA | WNSGALTSGVHTFPAVLQSS | ID NO: | LQMILNGINN | VGDRVTI | DEQLKSG |
| | SGFTFSDF | GLYSLSSVVTVPSSSLGTQT | 23) | YKNPKLTRML | TCRASQS | TASVVCL |
| | WMHWVRQA | YICNVNHKPSNTKVDKKVEP | | TFKFYMPKKA | VSRSLAW | LNNFYPR |
| | PGKGLEWI | KSCDKTHTCPPCPAPEAAGA | | TELKHLQCLE | YQQKPGK | EAKVQWK |
| | SYISGDSG | PSVFLFPPKPKDTLMISRTP | | EELKPLEEAL | APKLLIY | VDNALQS |
| | YTNYADSV | EVTCVVVDVSHEDPEVKENW | | NLAPSKNFHL | AASSLQS | GNSQESV |
| | KGRFTISR | YVDGVEVHNAKTKPREEQYN | | RPRDLISDIN | GVPSRES | TEQDSKD |
| | DNSKNTLY | STYRVVSVLTVLHQDWLNGK | | VIVLELKGSE | GSGSGTD | STYSLSS |
| | LQMNSLRA | EYKCKVSNKALPAPIEKTIS | | TTFMCEYADE | FTLTISS | TLTLSKA |
| | EDTAVYYC | KAKGQPREPQVYTLPPSREE | | TATIVEFINR | LQPEDFA | DYEKHKV |
| | ARDRPYYY | MTKNQVSLTCLVKGFYPSDI | | WITFSQSIIS | TYYCQQY | YACEVTH |
| | YMDVWGKG | AVEWESNGQPENNYKTTPPV | | TLT (SEQ | KSYPVTF | QGLSSPV |
| | TTVTVSS | LDSDGSFFLYSKLTVDKSRW | | ID NO: 41) | GQGTKVE | TKSFNRG |
| | (SEQ ID | QQGNVFSCSVMHEALHNHYT | | | IK (SEQ | EC (SEQ |
| | NO: 591) | QKSLSLSPG (SEQ ID | | | ID NO: | ID NO: |
| | | NO: 44) | | | 592) | 45) |
| MIAB | EVQLLESG | ASTKGPSVFPLAPSSKSTSG | GGGGS | APTSSSTKKT | DIQMTQS | RTVAAPS |
| 174 | GGLVQPGG | GTAALGCLVKDYFPEPVTVS | (SEQ | QLQLEHLLLD | PSSLSAS | VFIFPPS |
| | SLRLSCAA | WNSGALTSGVHTFPAVLQSS | ID NO: | LQMILNGINN | VGDRVTI | DEQLKSG |
| | SGFTFSDY | GLYSLSSVVTVPSSSLGTQT | 23) | YKNPKLTRML | TCRASQS | TASVVCL |
| | WMHWVRQA | YICNVNHKPSNTKVDKKVEP | | TFKFYMPKKA | VSRSLAW | LNNFYPR |
| | PGKGLEWI | KSCDKTHTCPPCPAPEAAGA | | TELKHLQCLE | YQQKPGK | EAKVQWK |
| | SYISGDSG | PSVFLFPPKPKDTLMISRTP | | EELKPLEEAL | APKLLIY | VDNALQS |
| | YTNYADSV | EVTCVVVDVSHEDPEVKENW | | NLAPSKNFHL | AASSLQS | GNSQESV |
| | KGRFTISR | YVDGVEVHNAKTKPREEQYN | | RPRDLISDIN | GVPSRFS | TEQDSKD |
| | DNSKNTLY | STYRVVSVLTVLHQDWLNGK | | VIVLELKGSE | GSGSGTD | STYSLSS |
| | LQMNSLRA | EYKCKVSNKALPAPIEKTIS | | TTFMCEYADE | FTLTISS | TLTLSKA |
| | EDTAVYYC | KAKGQPREPQVYTLPPSREE | | TATIVEFINR | LQPEDFA | DYEKHKV |
| | ARDRPYYY | MTKNQVSLTCLVKGFYPSDI | | WITFSQSIIS | TYYCQQY | YACEVTH |
| | YMDVWGKG | AVEWESNGQPENNYKTTPPV | | TLT (SEQ | KSYPVTF | QGLSSPV |
| | TTVTVSS | LDSDGSFFLYSKLTVDKSRW | | ID NO: 41) | GQGTKVE | TKSFNRG |
| | (SEQ ID | QQGNVFSCSVMHEALHNHYT | | | IK (SEQ | EC (SEQ |
| | NO: | QKSLSLSPG (SEQ ID | | | ID NO: | ID NO: |
| | 1391) | NO: 44) | | | 592) | 45) |
| MIAB | EVQLLESG | ASTKGPSVFPLAPSSKSTSG | GGGGS | APTSSSTKKT | DIQMTQS | RTVAAPS |
| 175 | GGLVQPGG | GTAALGCLVKDYFPEPVTVS | (SEQ | QLQLEHLLLD | PSSLSAS | VFIFPPS |
| | SLRLSCAA | WNSGALTSGVHTFPAVLQSS | ID NO: | LQMILNGINN | VGDRVTI | DEQLKSG |
| | SGFTFSSY | GLYSLSSVVTVPSSSLGTQT | 23) | YKNPKLTRML | TCRASOS | TASVVCL |
| | WMHWVRQA | YICNVNHKPSNTKVDKKVEP | | TFKFYMPKKA | VSRSLAW | LNNFYPR |
| | PGKGLEWI | KSCDKTHTCPPCPAPEAAGA | | TELKHLQCLE | YQQKPGK | EAKVQWK |
| | SYISGDSG | PSVFLFPPKPKDTLMISRTP | | EELKPLEEAL | APKLLIY | VDNALQS |
| | YTNYADSV | EVTCVVVDVSHEDPEVKENW | | NLAPSKNFHL | AASSLQS | GNSQESV |
| | KGRFTISR | YVDGVEVHNAKTKPREEQYN | | RPRDLISDIN | GVPSRES | TEQDSKD |
| | DNSKNTLY | STYRVVSVLTVLHQDWLNGK | | VIVLELKGSE | GSGSGTD | STYSLSS |
| | LQMNSLRA | EYKCKVSNKALPAPIEKTIS | | TTFMCEYADE | FTLTISS | TLTLSKA |
| | EDTAVYYC | KAKGQPREPQVYTLPPSREE | | TATIVEFINR | LQPEDFA | DYEKHKV |
| | ARDRPYYY | MTKNQVSLTCLVKGFYPSDI | | WITFSQSIIS | TYYCQQY | YACEVTH |
| | YMDVWGKG | AVEWESNGQPENNYKTTPPV | | TLT (SEQ | KSYPVTF | QGLSSPV |
| | TTVTVSS | LDSDGSFFLYSKLTVDKSRW | | ID NO: 41) | GQGTKVE | TKSFNRG |
| | (SEQ ID | QQGNVFSCSVMHEALHNHYT | | | IK (SEQ | EC (SEQ |
| | NO: | QKSLSLSPG (SEQ ID | | | ID NO: | ID NO: |
| | 1392) | NO: 44) | | | 592) | 45) |
| MIAB | EVQLLESG | ASTKGPSVFPLAPSSKSTSG | GGGGS | APTSSSTKKT | DIQMTQS | RTVAAPS |
| 176 | GGLVQPGG | GTAALGCLVKDYFPEPVTVS | (SEQ | QLQLEHLLLD | PSSLSAS | VFIFPPS |
| | SLRLSCAA | WNSGALTSGVHTFPAVLQSS | ID NO: | LQMILNGINN | VGDRVTI | DEQLKSG |
| | SGFTFSDF | GLYSLSSVVTVPSSSLGTQT | 23) | YKNPKLTRML | TCRASQS | TASVVCL |
| | WMHWVRQA | YICNVNHKPSNTKVDKKVEP | | TFKFYMPKKA | VSRSLAW | LNNFYPR |
| | PGKGLEWI | KSCDKTHTCPPCPAPEAAGA | | TELKHLQCLE | YQQKPGK | EAKVQWK |
| | SAISGSSG | PSVFLFPPKPKDTLMISRTP | | EELKPLEEAL | APKLLIY | VDNALQS |
| | STYYADSV | EVTCVVVDVSHEDPEVKENW | | NLAPSKNFHL | AASSLQS | GNSQESV |
| | KGRFTISR | YVDGVEVHNAKTKPREEQYN | | RPRDLISDIN | GVPSRFS | TEQDSKD |
| | DNSKNTLY | STYRVVSVLTVLHQDWLNGK | | VIVLELKGSE | GSGSGTD | STYSLSS |
| | LQMNSLRA | EYKCKVSNKALPAPIEKTIS | | TTFMCEYADE | FTLTISS | TLTLSKA |
| | EDTAVYYC | KAKGQPREPQVYTLPPSREE | | TATIVEFINR | LQPEDFA | DYEKHKV |
| | ARDRPYYY | MTKNQVSLTCLVKGFYPSDI | | WITFSQSIIS | TYYCQQY | YACEVTH |
| | YMDVWGKG | AVEWESNGQPENNYKTTPPV | | TLT (SEQ | KSYPVTF | QGLSSPV |
| | TTVTVSS | LDSDGSFFLYSKLTVDKSRW | | ID NO: 41) | GQGTKVE | TKSFNRG |
| | (SEQ ID | QQGNVFSCSVMHEALHNHYT | | | IK (SEQ | EC (SEQ |
| | NO: | QKSLSLSPG (SEQ ID | | | ID NO: | ID NO: |
| | 1393) | NO: 44) | | | 592) | 45) |
| MIAB | EVQLLESG | ASTKGPSVFPLAPSSKSTSG | GGGGS | APTSSSTKKT | DIQMTQS | RTVAAPS |
| 177 | GGLVQPGG | GTAALGCLVKDYFPEPVTVS | (SEQ | QLQLEHLLLD | PSSLSAS | VFIFPPS |
| | SLRLSCAA | WNSGALTSGVHTFPAVLQSS | ID NO: | LQMILNGINN | VGDRVTI | DEQLKSG |
| | SGFTFSDF | GLYSLSSVVTVPSSSLGTQT | 23) | YKNPKLTRML | TCRASQS | TASVVCL |
| | WMHWVRQA | YICNVNHKPSNTKVDKKVEP | | TFKFYMPKKA | VSRSLAW | LNNFYPR |
| | PGKGLEWV | KSCDKTHTCPPCPAPEAAGA | | TELKHLQCLE | YQQKPGK | EAKVQWK |
| | SAISGSGG | PSVFLFPPKPKDTLMISRTP | | EELKPLEEAL | APKLLIY | VDNALQS |
| | STYYADSV | EVTCVVVDVSHEDPEVKENW | | NLAPSKNFHL | AASSLQS | GNSQESV |
| | KGRFTISR | YVDGVEVHNAKTKPREEQYN | | RPRDLISDIN | GVPSRFS | TEQDSKD |
| | DNSKNTLY | STYRVVSVLTVLHQDWLNGK | | VIVLELKGSE | GSGSGTD | STYSLSS |
| | LQMNSLRA | EYKCKVSNKALPAPIEKTIS | | TTFMCEYADE | FTLTISS | TLTLSKA |
| | EDTAVYYC | KAKGQPREPQVYTLPPSREE | | TATIVEFINR | LQPEDFA | DYEKHKV |
| | ARDRPYYY | MTKNQVSLTCLVKGFYPSDI | | WITFSQSIIS | TYYCQQY | YACEVTH |
| | YMDVWGKG | AVEWESNGQPENNYKTTPPV | | TLT (SEQ | KSYPVTF | QGLSSPV |
| | TTVTVSS | LDSDGSFFLYSKLTVDKSRW | | ID NO: 41) | GQGTKVE | TKSFNRG |
| | (SEQ ID | QQGNVFSCSVMHEALHNHYT | | | IK (SEQ | EC (SEQ |
| | NO: | QKSLSLSPG (SEQ ID | | | ID NO: | ID NO: |
| | 1357) | NO: 44) | | | 592) | 45) |
| MIAB | EVQLLESG | ASTKGPSVFPLAPSSKSTSG | GGGGS | APTSSSTKKT | DIQMTQS | RTVAAPS |
| 178 | GGLVQPGG | GTAALGCLVKDYFPEPVTVS | (SEQ | QLQLEHLLLD | PSSLSAS | VFIFPPS |
| | SLRLSCAA | WNSGALTSGVHTFPAVLQSS | ID NO: | LQMILNGINN | VGDRVTI | DEQLKSG |
| | SGFTFSSY | GLYSLSSVVTVPSSSLGTQT | 23) | YKNPKLTRML | TCRASQS | TASVVCL |
| | WMHWVRQA | YICNVNHKPSNTKVDKKVEP | | TFKFYMPKKA | VSRSLAW | LNNFYPR |
| | PGKGLEWI | KSCDKTHTCPPCPAPEAAGA | | TELKHLQCLE | YQQKPGK | EAKVQWK |
| | SAISGSSG | PSVFLFPPKPKDTLMISRTP | | EELKPLEEAL | APKLLIY | VDNALQS |
| | STYYADSV | EVTCVVVDVSHEDPEVKENW | | NLAPSKNFHL | AASSLQS | GNSQESV |
| | KGRFTISR | YVDGVEVHNAKTKPREEQYN | | RPRDLISDIN | GVPSRES | TEQDSKD |
| | DNSKNTLY | STYRVVSVLTVLHQDWLNGK | | VIVLELKGSE | GSGSGTD | STYSLSS |
| | LQMNSLRA | EYKCKVSNKALPAPIEKTIS | | TTFMCEYADE | FTLTISS | TLTLSKA |
| | EDTAVYYC | KAKGQPREPQVYTLPPSREE | | TATIVEFINR | LQPEDFA | DYEKHKV |
| | ARDRPYYY | MTKNQVSLTCLVKGFYPSDI | | WITFSQSIIS | TYYCQQY | YACEVTH |
| | YMDVWGKG | AVEWESNGQPENNYKTTPPV | | TLT (SEQ | KSYPVTF | QGLSSPV |
| | TTVTVSS | LDSDGSFFLYSKLTVDKSRW | | ID NO: 41) | GQGTKVE | TKSFNRG |
| | (SEQ ID | QQGNVFSCSVMHEALHNHYT | | | IK (SEQ | EC (SEQ |
| | NO: | QKSLSLSPG (SEQ ID | | | ID NO: | ID NO: |
| | 1394) | NO: 44) | | | 592) | 45) |
| MIAB | EVQLLESG | ASTKGPSVFPLAPSSKSTSG | GGGGS | APTSSSTKKT | DIQMTQS | RTVAAPS |
| 179 | GGLVQPGG | GTAALGCLVKDYFPEPVTVS | (SEQ | QLQLEHLLLD | PSSLSAS | VFIFPPS |
| | SLRLSCAA | WNSGALTSGVHTFPAVLQSS | ID NO: | LQMILNGINN | VGDRVTI | DEQLKSG |
| | SGFTFSSY | GLYSLSSVVTVPSSSLGTQT | 23) | YKNPKLTRML | TCRASQS | TASVVCL |
| | WMHWVRQA | YICNVNHKP SNTKVDKKVEP | | TFKFYMPKKA | ISRYLAW | LNNFYPR |
| | PGKGLEWV | KSCDKTHTCPPCPAPEAAGA | | TELKHLQCLE | YQQKPGK | EAKVQWK |
| | SAISGSGG | PSVFLFPPKPKDTLMISRTP | | EELKPLEEAL | APKLLIY | VDNALQS |
| | STYYADSV | EVTCVVVDVSHEDPEVKENW | | NLAPSKNFHL | AASSLQS | GNSQESV |
| | KGRFTISR | YVDGVEVHNAKTKPREEQYN | | RPRDLISDIN | GVPSRFS | TEQDSKD |
| | DNSKNTLY | STYRVVSVLTVLHQDWLNGK | | VIVLELKGSE | GSGSGTD | STYSLSS |
| | LQMNSLRA | EYKCKVSNKALPAPIEKTIS | | TTFMCEYADE | FTLTISS | TLTLSKA |
| | EDTAVYYC | KAKGQPREPQVYTLPPSREE | | TATIVEFINR | LQPEDFA | DYEKHKV |
| | ARDRPYYY | MTKNQVSLTCLVKGFYPSDI | | WITFSQSIIS | TYYCQQY | YACEVTH |
| | YMDVWGKG | AVEWESNGQPENNYKTTPPV | | TLT (SEQ | KSYPVTF | QGLSSPV |
| | TTVTVSS | LDSDGSFFLYSKLTVDKSRW | | ID NO: 41) | GQGTKVE | TKSFNRG |
| | (SEQ ID | QQGNVFSCSVMHEALHNHYT | | | IK (SEQ | EC (SEQ |
| | NO: | QKSLSLSPG (SEQ ID | | | ID NO: | ID NO: |
| | 1395) | NO: 44) | | | 1368) | 45) |
| MIAB | EVQLLESG | ASTKGPSVFPLAPSSKSTSG | GGGGS | APTSSSTKKT | DIQMTQS | RTVAAPS |
| 180 | GGLVQPGG | GTAALGCLVKDYFPEPVTVS | (SEQ | QLQLEHLLLD | PSSLSAS | VFIFPPS |
| | SLRLSCAA | WNSGALTSGVHTFPAVLQSS | ID NO: | LQMILNGINN | VGDRVTI | DEQLKSG |
| | SGFTFSSY | GLYSLSSVVTVPSSSLGTQT | 23) | YKNPKLTRML | TCRASQS | TASVVCL |
| | WMHWVRQA | YICNVNHKPSNTKVDKKVEP | | TFKFYMPKKA | VSRSLAW | LNNFYPR |
| | PGKGLEWV | KSCDKTHTCPPCPAPEAAGA | | TELKHLQCLE | YQQKPGK | EAKVQWK |
| | SAISGSGG | PSVFLFPPKPKDTLMISRTP | | EELKPLEEAL | APKLLIY | VDNALQS |
| | STYYADSV | EVTCVVVDVSHEDPEVKENW | | NLAPSKNFHL | AASSLQS | GNSQESV |
| | KGRFTISR | YVDGVEVHNAKTKPREEQYN | | RPRDLISDIN | GVPSRES | TEQDSKD |
| | DNSKNTLY | STYRVVSVLTVLHQDWLNGK | | VIVLELKGSE | GSGSGTD | STYSLSS |
| | LQMNSLRA | EYKCKVSNKALPAPIEKTIS | | TTFMCEYADE | FTLTISS | TLTLSKA |
| | EDTAVYYC | KAKGQPREPQVYTLPPSREE | | TATIVEFINR | LQPEDFA | DYEKHKV |
| | ARDRPYYY | MTKNQVSLTCLVKGFYPSDI | | WITFSQSIIS | TYYCQQY | YACEVTH |
| | YMDVWGKG | AVEWESNGQPENNYKTTPPV | | TLT (SEQ | KSYPVTF | QGLSSPV |
| | TTVTVSS | LDSDGSFFLYSKLTVDKSRW | | ID NO: 41) | GQGTKVE | TKSFNRG |
| | (SEQ ID | QQGNVFSCSVMHEALHNHYT | | | IK (SEQ | EC (SEQ |
| | NO: | QKSLSLSPG (SEQ ID | | | ID NO: | ID NO: |
| | 1395) | NO: 44) | | | 592) | 45) |
| MIAB | EVQLLESG | ASTKGPSVFPLAPSSKSTSG | GGGGS | APTSSSTKKT | DIQMTQS | RTVAAPS |
| 181 | GGLVQPGG | GTAALGCLVKDYFPEPVTVS | (SEQ | QLQLEHLLLD | PSSLSAS | VFIFPPS |
| | SLRLSCAA | WNSGALTSGVHTFPAVLQSS | ID NO: | LQMILNGINN | VGDRVTI | DEQLKSG |
| | SGFTFSSY | GLYSLSSVVTVPSSSLGTQT | 23) | YKNPKLTRML | TCRASQS | TASVVCL |
| | WMHWVRQA | YICNVNHKPSNTKVDKKVEP | | TFKFYMPKKA | ISRYLAW | LNNFYPR |
| | PGKGLEWV | KSCDKTHTCPPCPAPEAAGA | | TELKHLQCLE | YQQKPGK | EAKVQWK |
| | SAISGSGG | PSVFLFPPKPKDTLMISRTP | | EELKPLEEAL | APKLLIY | VDNALQS |
| | STYYADSV | EVTCVVVDVSHEDPEVKFNW | | NLAPSKNFHL | AASSLQS | GNSQESV |
| | KGRFTISR | YVDGVEVHNAKTKPREEQYN | | RPRDLISDIN | GVPSRFS | TEQDSKD |
| | DNSKNTLY | STYRVVSVLTVLHQDWLNGK | | VIVLELKGSE | GSGSGTD | STYSLSS |
| | LQMNSLRA | EYKCKVSNKALPAPIEKTIS | | TTFMCEYADE | FTLTISS | TLTLSKA |
| | EDTAVYYC | KAKGQPREPQVYTLPPSREE | | TATIVEFINR | LQPEDFA | DYEKHKV |
| | ARDRPYYY | MTKNQVSLTCLVKGFYPSDI | | WITFSQSIIS | TYYCQQY | YACEVTH |
| | YMDVWGKG | AVEWESNGQPENNYKTTPPV | | TLT (SEQ | KSYPVTF | QGLSSPV |
| | TTVTVSS | LDSDGSFFLYSKLTVDKSRW | | ID NO: 41) | GQGTKVE | TKSFNRG |
| | (SEQ ID | QQGNVFSCSVMHEALHNHYT | | | IK (SEQ | EC (SEQ |
| | NO: | QKSLSLSPG (SEQ ID | | | ID NO: | ID NO: |
| | 1395) | NO: 44) | | | 1368) | 45) |
| MIAB | EVQLLESG | ASTKGPSVFPLAPSSKSTSG | GGGGS | APTSSSTKKT | DIQMTQS | RTVAAPS |
| 182 | GGLVQPGG | GTAALGCLVKDYFPEPVTVS | (SEQ | QLQLEHLLLD | PSSLSAS | VFIFPPS |
| | SLRLSCAA | WNSGALTSGVHTFPAVLQSS | ID NO: | LQMILNGINN | VGDRVTI | DEQLKSG |
| | SGFTFSSY | GLYSLSSVVTVPSSSLGTQT | 23) | YKNPKLTRML | TCRASQS | TASVVCL |
| | WMHWVRQA | YICNVNHKPSNTKVDKKVEP | | TFKFYMPKKA | ISRSLAW | LNNFYPR |
| | PGKGLEWV | KSCDKTHTCPPCPAPEAAGA | | TELKHLQCLE | YQQKPGK | EAKVQWK |
| | SAISGSGG | PSVFLFPPKPKDTLMISRTP | | EELKPLEEAL | APKLLIY | VDNALQS |
| | STYYADSV | EVTCVVVDVSHEDPEVKENW | | NLAPSKNFHL | AASSLQS | GNSQESV |
| | KGRFTISR | YVDGVEVHNAKTKPREEQYN | | RPRDLISDIN | GVPSRFS | TEQDSKD |
| | DNSKNTLY | STYRVVSVLTVLHQDWLNGK | | VIVLELKGSE | GSGSGTD | STYSLSS |
| | LQMNSLRA | EYKCKVSNKALPAPIEKTIS | | TTFMCEYADE | FTLTISS | TLTLSKA |
| | EDTAVYYC | KAKGQPREPQVYTLPPSREE | | TATIVEFINR | LQPEDFA | DYEKHKV |
| | ARDRPYYY | MTKNQVSLTCLVKGFYPSDI | | WITFSQSIIS | TYYCQQY | YACEVTH |
| | YMDVWGKG | AVEWESNGQPENNYKTTPPV | | TLT (SEQ | KSYPVTF | QGLSSPV |
| | TTVTVSS | LDSDGSFFLYSKLTVDKSRW | | ID NO: 41) | GQGTKVE | TKSFNRG |
| | (SEQ ID | QQGNVFSCSVMHEALHNHYT | | | IK (SEQ | EC (SEQ |
| | NO: | QKSLSLSPG (SEQ ID | | | ID NO: | ID NO: |
| | 1395) | NO: 44) | | | 1363) | 45) |
| MIAB | EVQLLESG | ASTKGPSVFPLAPSSKSTSG | GGGGS | APTSSSTKKT | DIQMTQS | RTVAAPS |
| 183 | GGLVQPGG | GTAALGCLVKDYFPEPVTVS | (SEQ | QLQLEHLLLD | PSSLSAS | VFIFPPS |
| | SLRLSCAA | WNSGALTSGVHTFPAVLQSS | ID NO: | LQMILNGINN | VGDRVTI | DEQLKSG |
| | SGFTFSSY | GLYSLSSVVTVPSSSLGTQT | 23) | YKNPKLTRML | TCRASQS | TASVVCL |
| | WMHWVRQA | YICNVNHKPSNTKVDKKVEP | | TFKFYMPKKA | VSSSLAW | LNNFYPR |
| | PGKGLEWV | KSCDKTHTCPPCPAPEAAGA | | TELKHLQCLE | YQQKPGK | EAKVQWK |
| | SAISGSGG | PSVFLFPPKPKDTLMISRTP | | EELKPLEEAL | APKLLIY | VDNALQS |
| | STYYADSV | EVTCVVVDVSHEDPEVKENW | | NLAPSKNFHL | AASSLQS | GNSQESV |
| | KGRFTISR | YVDGVEVHNAKTKPREEQYN | | RPRDLISDIN | GVPSRFS | TEQDSKD |
| | DNSKNTLY | STYRVVSVLTVLHQDWLNGK | | VIVLELKGSE | GSGSGTD | STYSLSS |
| | LQMNSLRA | EYKCKVSNKALPAPIEKTIS | | TTFMCEYADE | FTLTISS | TLTLSKA |
| | EDTAVYYC | KAKGQPREPQVYTLPPSREE | | TATIVEFINR | LQPEDFA | DYEKHKV |
| | ARDRPYYY | MTKNQVSLTCLVKGFYPSDI | | WITFSQSIIS | TYYCQQY | YACEVTH |
| | YMDVWGKG | AVEWESNGOPENNYKTTPPV | | TLT (SEQ | KSYPVTF | QGLSSPV |
| | TTVTVSS | LDSDGSFFLYSKLTVDKSRW | | ID NO: 41) | GQGTKVE | TKSFNRG |
| | (SEQ ID | QQGNVFSCSVMHEALHNHYT | | | IK (SEQ | EC (SEQ |
| | NO: | QKSLSLSPG (SEQ ID | | | ID NO: | ID NO: |
| | 1395) | NO: 44) | | | 1364) | 45) |
| MIAB | EVQLLESG | ASTKGPSVFPLAPSSKSTSG | GGGGS | APTSSSTKKT | DIQMTQS | RTVAAPS |
| 184 | GGLVQPGG | GTAALGCLVKDYFPEPVTVS | (SEQ | QLQLEHLLLD | PSSLSAS | VFIFPPS |
| | SLRLSCAA | WNSGALTSGVHTFPAVLQSS | ID NO: | LQMILNGINN | VGDRVTI | DEQLKSG |
| | SGFTFSSY | GLYSLSSVVTVPSSSLGTQT | 23) | YKNPKLTRML | TCRASQS | TASVVCL |
| | WMHWVRQA | YICNVNHKPSNTKVDKKVEP | | TFKFYMPKKA | ISSSLAW | LNNFYPR |
| | PGKGLEWV | KSCDKTHTCPPCPAPEAAGA | | TELKHLQCLE | YQQKPGK | EAKVQWK |
| | SAISGSGG | PSVFLFPPKPKDTLMISRTP | | EELKPLEEAL | APKLLIY | VDNALQS |
| | STYYADSV | EVTCVVVDVSHEDPEVKENW | | NLAPSKNFHL | AASSLQS | GNSQESV |
| | KGRFTISR | YVDGVEVHNAKTKPREEQYN | | RPRDLISDIN | GVPSRFS | TEQDSKD |
| | DNSKNTLY | STYRVVSVLTVLHQDWLNGK | | VIVLELKGSE | GSGSGTD | STYSLSS |
| | LQMNSLRA | EYKCKVSNKALPAPIEKTIS | | TTFMCEYADE | FTLTISS | TLTLSKA |
| | EDTAVYYC | KAKGQPREPQVYTLPPSREE | | TATIVEFINR | LQPEDFA | DYEKHKV |
| | ARDRPYYY | MTKNQVSLTCLVKGFYPSDI | | WITFSQSIIS | TYYCQQY | YACEVTH |
| | YMDVWGKG | AVEWESNGQPENNYKTTPPV | | TLT (SEQ | KSYPVTF | QGLSSPV |
| | TTVTVSS | LDSDGSFFLYSKLTVDKSRW | | ID NO: 41) | GQGTKVE | TKSENRG |
| | (SEQ ID | QQGNVFSCSVMHEALHNHYT | | | IK (SEQ | EC (SEQ |
| | NO: | QKSLSLSPG (SEQ ID | | | ID NO: | ID NO: |
| | 1395) | NO: 44) | | | 1367) | 45) |
| MIAB | EVQLLESG | ASTKGPSVFPLAPSSKSTSG | GGGGS | APTSSSTKKT | DIQMTQS | RTVAAPS |
| 185 | GGLVQPGG | GTAALGCLVKDYFPEPVTVS | (SEQ | QLQLEHLLLD | PSSLSAS | VFIFPPS |
| | SLRLSCAA | WNSGALTSGVHTFPAVLQSS | ID NO: | LQMILNGINN | VGDRVTI | DEQLKSG |
| | SGFTFSSY | GLYSLSSVVTVPSSSLGTQT | 23) | YKNPKLTRML | TCRASOS | TASVVCL |
| | WMHWVRQA | YICNVNHKPSNTKVDKKVEP | | TFKFYMPKKA | ISRSLAW | LNNFYPR |
| | PGKGLEWI | KSCDKTHTCPPCPAPEAAGA | | TELKHLQCLE | YQQKPGK | EAKVQWK |
| | SYISGDSG | PSVFLFPPKPKDTLMISRTP | | EELKPLEEAL | APKLLIY | VDNALQS |
| | YTNYADSV | EVTCVVVDVSHEDPEVKENW | | NLAPSKNFHL | AASSLQS | GNSQESV |
| | KGRFTISR | YVDGVEVHNAKTKPREEQYN | | RPRDLISDIN | GVPSRES | TEQDSKD |
| | DNSKNTLY | STYRVVSVLTVLHQDWLNGK | | VIVLELKGSE | GSGSGTD | STYSLSS |
| | LQMNSLRA | EYKCKVSNKALPAPIEKTIS | | TTFMCEYADE | FTLTISS | TLTLSKA |
| | EDTAVYYC | KAKGQPREPQVYTLPPSREE | | TATIVEFINR | LQPEDFA | DYEKHKV |
| | ARDRPYYY | MTKNQVSLTCLVKGFYPSDI | | WITFSQSIIS | TYYCQQY | YACEVTH |
| | IMDVWGKG | AVEWESNGQPENNYKTTPPV | | TLT (SEQ | KSYPVTF | QGLSSPV |
| | TTVTVSS | LDSDGSFFLYSKLTVDKSRW | | ID NO: 41) | GQGTKVE | TKSFNRG |
| | (SEQ ID | QQGNVFSCSVMHEALHNHYT | | | IK (SEQ | EC (SEQ |
| | NO: | QKSLSLSPG (SEQ ID | | | ID NO: | ID NO: |
| | 1396) | NO: 44) | | | 1363) | 45) |
| MIAB | EVQLLESG | ASTKGPSVFPLAPSSKSTSG | GGGGS | APTSSSTKKT | DIQMTQS | RTVAAPS |
| 186 | GGLVQPGG | GTAALGCLVKDYFPEPVTVS | (SEQ | QLQLEHLLLD | PSSLSAS | VFIFPPS |
| | SLRLSCAA | WNSGALTSGVHTFPAVLQSS | ID NO: | LQMILNGINN | VGDRVTI | DEQLKSG |
| | SGFTFSSY | GLYSLSSVVTVPSSSLGTQT | 23) | YKNPKLTRML | TCRASQS | TASVVCL |
| | WMHWVRQA | YICNVNHKPSNTKVDKKVEP | | TFKFYMPKKA | VSSSLAW | LNNFYPR |
| | PGKGLEWI | KSCDKTHTCPPCPAPEAAGA | | TELKHLQCLE | YQQKPGK | EAKVQWK |
| | SYISGDSG | PSVFLFPPKPKDTLMISRTP | | EELKPLEEAL | APKLLIY | VDNALQS |
| | YTNYADSV | EVTCVVVDVSHEDPEVKENW | | NLAPSKNFHL | AASSLQS | GNSQESV |
| | KGRFTISR | YVDGVEVHNAKTKPREEQYN | | RPRDLISDIN | GVPSRFS | TEQDSKD |
| | DNSKNTLY | STYRVVSVLTVLHQDWLNGK | | VIVLELKGSE | GSGSGTD | STYSLSS |
| | LQMNSLRA | EYKCKVSNKALPAPIEKTIS | | TTFMCEYADE | FTLTISS | TLTLSKA |
| | EDTAVYYC | KAKGQPREPQVYTLPPSREE | | TATIVEFINR | LQPEDFA | DYEKHKV |
| | ARDRPYYY | MTKNQVSLTCLVKGFYPSDI | | WITFSQSIIS | TYYCQQY | YACEVTH |
| | IMDVWGKG | AVEWESNGQPENNYKTTPPV | | TLT (SEQ | KSYPVTF | QGLSSPV |
| | TTVTVSS | LDSDGSFFLYSKLTVDKSRW | | ID NO: 41) | GQGTKVE | TKSFNRG |
| | (SEQ ID | QQGNVFSCSVMHEALHNHYT | | | IK (SEQ | EC (SEQ |
| | NO: | QKSLSLSPG (SEQ ID | | | ID NO: | ID NO: |
| | 1396) | NO: 44) | | | 1364) | 45) |
| MIAB | EVQLLESG | ASTKGPSVFPLAPSSKSTSG | GGGGS | APTSSSTKKT | DIQMTQS | RTVAAPS |
| 187 | GGLVQPGG | GTAALGCLVKDYFPEPVTVS | (SEQ | QLQLEHLLLD | PSSLSAS | VFIFPPS |
| | SLRLSCAA | WNSGALTSGVHTFPAVLQSS | ID NO: | LQMILNGINN | VGDRVTI | DEQLKSG |
| | SGFTFSSY | GLYSLSSVVTVPSSSLGTQT | 23) | YKNPKLTRML | TCRASOS | TASVVCL |
| | WMHWVRQA | YICNVNHKPSNTKVDKKVEP | | TFKFYMPKKA | ISSSLAW | LNNFYPR |
| | PGKGLEWI | KSCDKTHTCPPCPAPEAAGA | | TELKHLQCLE | YQQKPGK | EAKVQWK |
| | SYISGDSG | PSVFLFPPKPKDTLMISRTP | | EELKPLEEAL | APKLLIY | VDNALQS |
| | YTNYADSV | EVTCVVVDVSHEDPEVKENW | | NLAPSKNFHL | AASSLQS | GNSQESV |
| | KGRFTISR | YVDGVEVHNAKTKPREEQYN | | RPRDLISDIN | GVPSRES | TEQDSKD |
| | DNSKNTLY | STYRVVSVLTVLHQDWLNGK | | VIVLELKGSE | GSGSGTD | STYSLSS |
| | LQMNSLRA | EYKCKVSNKALPAPIEKTIS | | TTFMCEYADE | FTLTISS | TLTLSKA |
| | EDTAVYYC | KAKGQPREPQVYTLPPSREE | | TATIVEFINR | LQPEDFA | DYEKHKV |
| | ARDRPYYY | MTKNQVSLTCLVKGFYPSDI | | WITFSQSIIS | TYYCQQY | YACEVTH |
| | IMDVWGKG | AVEWESNGQPENNYKTTPPV | | TLT (SEQ | KSYPVTF | QGLSSPV |
| | TTVTVSS | LDSDGSFFLYSKLTVDKSRW | | ID NO: 41) | GQGTKVE | TKSFNRG |
| | (SEQ ID | QQGNVFSCSVMHEALHNHYT | | | IK (SEQ | EC (SEQ |
| | NO: | QKSLSLSPG (SEQ ID | | | ID NO: | ID NO: |
| | 1396) | NO: 44) | | | 1367) | 45) |
| MIAB | EVQLLESG | ASTKGPSVFPLAPSSKSTSG | GGGGS | APTSSSTKKT | DIQMTQS | RTVAAPS |
| 188 | GGLVQPGG | GTAALGCLVKDYFPEPVTVS | (SEQ | QLQLEHLLLD | PSSLSAS | VFIFPPS |
| | SLRLSCAA | WNSGALTSGVHTFPAVLQSS | ID NO: | LQMILNGINN | VGDRVTI | DEQLKSG |
| | SGFTFSDF | GLYSLSSVVTVPSSSLGTQT | 23) | YKNPKLTRML | TCRASOS | TASVVCL |
| | WMHWVRQA | YICNVNHKPSNTKVDKKVEP | | TFKFYMPKKA | ISRSLAW | LNNFYPR |
| | PGKGLEWV | KSCDKTHTCPPCPAPEAAGA | | TELKHLQCLE | YQQKPGK | EAKVQWK |
| | SAISGSGG | PSVFLFPPKPKDTLMISRTP | | EELKPLEEAL | APKLLIY | VDNALQS |
| | STYYADSV | EVTCVVVDVSHEDPEVKENW | | NLAPSKNFHL | AASSLQS | GNSQESV |
| | KGRFTISR | YVDGVEVHNAKTKPREEQYN | | RPRDLISDIN | GVPSRFS | TEQDSKD |
| | DNSKNTLY | STYRVVSVLTVLHQDWLNGK | | VIVLELKGSE | GSGSGTD | STYSLSS |
| | LQMNSLRA | EYKCKVSNKALPAPIEKTIS | | TTFMCEYADE | FTLTISS | TLTLSKA |
| | EDTAVYYC | KAKGQPREPQVYTLPPSREE | | TATIVEFINR | LQPEDFA | DYEKHKV |
| | ARDRPYYY | MTKNQVSLTCLVKGFYPSDI | | WITFSQSIIS | TYYCQQY | YACEVTH |
| | IMDVWGKG | AVEWESNGQPENNYKTTPPV | | TLT (SEQ | KSYPVTF | QGLSSPV |
| | TTVTVSS | LDSDGSFFLYSKLTVDKSRW | | ID NO: 41) | GQGTKVE | TKSFNRG |
| | (SEQ ID | QQGNVFSCSVMHEALHNHYT | | | IK (SEQ | EC (SEQ |
| | NO: | QKSLSLSPG (SEQ ID | | | ID NO: | ID NO: |
| | 1397) | NO: 44) | | | 1363) | 45) |
| MIAB | EVQLLESG | ASTKGPSVFPLAPSSKSTSG | GGGGS | APTSSSTKKT | DIQMTQS | RTVAAPS |
| 189 | GGLVQPGG | GTAALGCLVKDYFPEPVTVS | (SEQ | QLQLEHLLLD | PSSLSAS | VFIFPPS |
| | SLRLSCAA | WNSGALTSGVHTFPAVLQSS | ID NO: | LQMILNGINN | VGDRVTI | DEQLKSG |
| | SGFTFSDF | GLYSLSSVVTVPSSSLGTQT | 23) | YKNPKLTRML | TCRASQS | TASVVCL |
| | WMHWVRQA | YICNVNHKPSNTKVDKKVEP | | TFKFYMPKKA | VSSSLAW | LNNFYPR |
| | PGKGLEWV | KSCDKTHTCPPCPAPEAAGA | | TELKHLQCLE | YQQKPGK | EAKVQWK |
| | SAISGSGG | PSVFLFPPKPKDTLMISRTP | | EELKPLEEAL | APKLLIY | VDNALQS |
| | STYYADSV | EVTCVVVDVSHEDPEVKENW | | NLAPSKNFHL | AASSLQS | GNSQESV |
| | KGRFTISR | YVDGVEVHNAKTKPREEQYN | | RPRDLISDIN | GVPSRES | TEQDSKD |
| | DNSKNTLY | STYRVVSVLTVLHQDWLNGK | | VIVLELKGSE | GSGSGTD | STYSLSS |
| | LQMNSLRA | EYKCKVSNKALPAPIEKTIS | | TTFMCEYADE | FTLTISS | TLTLSKA |
| | EDTAVYYC | KAKGQPREPQVYTLPPSREE | | TATIVEFINR | LQPEDFA | DYEKHKV |
| | ARDRPYYY | MTKNQVSLTCLVKGFYPSDI | | WITFSQSIIS | TYYCQQY | YACEVTH |
| | IMDVWGKG | AVEWESNGQPENNYKTTPPV | | TLT (SEQ | KSYPVTF | QGLSSPV |
| | TTVTVSS | LDSDGSFFLYSKLTVDKSRW | | ID NO: 41) | GQGTKVE | TKSFNRG |
| | (SEQ ID | QQGNVFSCSVMHEALHNHYT | | | IK (SEQ | EC (SEQ |
| | NO: | QKSLSLSPG (SEQ ID | | | ID NO: | ID NO: |
| | 1397) | NO: 44) | | | 1364) | 45) |
| MIAB | EVQLLESG | ASTKGPSVFPLAPSSKSTSG | GGGGS | APTSSSTKKT | DIOMTQS | RTVAAPS |
| 190 | GGLVQPGG | GTAALGCLVKDYFPEPVTVS | (SEQ | QLQLEHLLLD | PSSLSAS | VFIFPPS |
| | SLRLSCAA | WNSGALTSGVHTFPAVLQSS | ID NO: | LQMILNGINN | VGDRVTI | DEQLKSG |
| | SGFTFSDF | GLYSLSSVVTVPSSSLGTQT | 23) | YKNPKLTRML | TCRASQS | TASVVCL |
| | WMHWVRQA | YICNVNHKPSNTKVDKKVEP | | TFKFYMPKKA | ISSSLAW | LNNFYPR |
| | PGKGLEWV | KSCDKTHTCPPCPAPEAAGA | | TELKHLQCLE | YQQKPGK | EAKVQWK |
| | SAISGSGG | PSVFLFPPKPKDTLMISRTP | | EELKPLEEAL | APKLLIY | VDNALQS |
| | STYYADSV | EVTCVVVDVSHEDPEVKENW | | NLAPSKNFHL | AASSLQS | GNSQESV |
| | KGRFTISR | YVDGVEVHNAKTKPREEQYN | | RPRDLISDIN | GVPSRFS | TEQDSKD |
| | DNSKNTLY | STYRVVSVLTVLHQDWLNGK | | VIVLELKGSE | GSGSGTD | STYSLSS |
| | LQMNSLRA | EYKCKVSNKALPAPIEKTIS | | TTFMCEYADE | FTLTISS | TLTLSKA |
| | EDTAVYYC | KAKGQPREPQVYTLPPSREE | | TATIVEFINR | LQPEDFA | DYEKHKV |
| | ARDRPYYY | MTKNQVSLTCLVKGFYPSDI | | WITFSQSIIS | TYYCQQY | YACEVTH |
| | IMDVWGKG | AVEWESNGQPENNYKTTPPV | | TLT (SEQ | KSYPVTF | QGLSSPV |
| | TTVTVSS | LDSDGSFFLYSKLTVDKSRW | | ID NO: 41) | GQGTKVE | TKSFNRG |
| | (SEQ ID | QQGNVFSCSVMHEALHNHYT | | | IK (SEQ | EC (SEQ |
| | NO: | QKSLSLSPG (SEQ ID | | | ID NO: | ID NO: |
| | 1397) | NO: 44) | | | 1367) | 45) |
| MIAB | EVQLLESG | ASTKGPSVFPLAPSSKSTSG | GGGGS | APTSSSTKKT | DIQMTQS | RTVAAPS |
| 191 | GGLVQPGG | GTAALGCLVKDYFPEPVTVS | (SEQ | QLQLEHLLLD | PSSLSAS | VFIFPPS |
| | SLRLSCAA | WNSGALTSGVHTFPAVLQSS | ID NO: | LQMILNGINN | VGDRVTI | DEQLKSG |
| | SGFTFSSY | GLYSLSSVVTVPSSSLGTQT | 23) | YKNPKLTRML | TCRASQS | TASVVCL |
| | WMHWVRQA | YICNVNHKPSNTKVDKKVEP | | TFKFYMPKKA | ISRSLAW | LNNFYPR |
| | PGKGLEWV | KSCDKTHTCPPCPAPEAAGA | | TELKHLQCLE | YQQKPGK | EAKVQWK |
| | SAISGSGG | PSVFLFPPKPKDTLMISRTP | | EELKPLEEAL | APKLLIY | VDNALQS |
| | STYYADSV | EVTCVVVDVSHEDPEVKFNW | | NLAPSKNFHL | AASSLQS | GNSQESV |
| | KGRFTISR | YVDGVEVHNAKTKPREEQYN | | RPRDLISDIN | GVPSRFS | TEQDSKD |
| | DNSKNTLY | STYRVVSVLTVLHQDWLNGK | | VIVLELKGSE | GSGSGTD | STYSLSS |
| | LQMNSLRA | EYKCKVSNKALPAPIEKTIS | | TTFMCEYADE | FTLTISS | TLTLSKA |
| | EDTAVYYC | KAKGQPREPQVYTLPPSREE | | TATIVEFINR | LQPEDFA | DYEKHKV |
| | ARDRPYYY | MTKNQVSLTCLVKGFYPSDI | | WITFSQSIIS | TYYCQQY | YACEVTH |
| | IMDVWGKG | AVEWESNGQPENNYKTTPPV | | TLT (SEQ | KSYPVTF | QGLSSPV |
| | TTVTVSS | LDSDGSFFLYSKLTVDKSRW | | ID NO: 41) | GQGTKVE | TKSFNRG |
| | (SEQ ID | QQGNVFSCSVMHEALHNHYT | | | IK (SEQ | EC (SEQ |
| | NO: | QKSLSLSPG (SEQ ID | | | ID NO: | ID NO: |
| | 1398) | NO: 44) | | | 1363) | 45) |
| MIAB | EVQLLESG | ASTKGPSVFPLAPSSKSTSG | GGGGS | APTSSSTKKT | DIQMTQS | RTVAAPS |
| 192 | GGLVQPGG | GTAALGCLVKDYFPEPVTVS | (SEQ | QLQLEHLLLD | PSSLSAS | VFIFPPS |
| | SLRLSCAA | WNSGALTSGVHTFPAVLQSS | ID NO: | LQMILNGINN | VGDRVTI | DEQLKSG |
| | SGFTFSSY | GLYSLSSVVTVPSSSLGTQT | 23) | YKNPKLTRML | TCRASQS | TASVVCL |
| | WMHWVRQA | YICNVNHKPSNTKVDKKVEP | | TFKFYMPKKA | VSSSLAW | LNNFYPR |
| | PGKGLEWV | KSCDKTHTCPPCPAPEAAGA | | TELKHLQCLE | YQQKPGK | EAKVQWK |
| | SAISGSGG | PSVFLFPPKPKDTLMISRTP | | EELKPLEEAL | APKLLIY | VDNALQS |
| | STYYADSV | EVTCVVVDVSHEDPEVKENW | | NLAPSKNFHL | AASSLQS | GNSQESV |
| | KGRFTISR | YVDGVEVHNAKTKPREEQYN | | RPRDLISDIN | GVPSRFS | TEQDSKD |
| | DNSKNTLY | STYRVVSVLTVLHQDWLNGK | | VIVLELKGSE | GSGSGTD | STYSLSS |
| | LQMNSLRA | EYKCKVSNKALPAPIEKTIS | | TTFMCEYADE | FTLTISS | TLTLSKA |
| | EDTAVYYC | KAKGQPREPQVYTLPPSREE | | TATIVEFINR | LQPEDFA | DYEKHKV |
| | ARDRPYYY | MTKNQVSLTCLVKGFYPSDI | | WITFSQSIIS | TYYCQQY | YACEVTH |
| | IMDVWGKG | AVEWESNGQPENNYKTTPPV | | TLT (SEQ | KSYPVTF | QGLSSPV |
| | TTVTVSS | LDSDGSFFLYSKLTVDKSRW | | ID NO: 41) | GQGTKVE | TKSFNRG |
| | (SEQ ID | QQGNVFSCSVMHEALHNHYT | | | IK (SEQ | EC (SEQ |
| | NO: | QKSLSLSPG (SEQ ID | | | ID NO: | ID NO: |
| | 1398) | NO: 44) | | | 1364) | 45) |
| MIAB | EVQLLESG | ASTKGPSVFPLAPSSKSTSG | GGGGS | APTSSSTKKT | DIQMTQS | RTVAAPS |
| 193 | GGLVQPGG | GTAALGCLVKDYFPEPVTVS | (SEQ | QLQLEHLLLD | PSSLSAS | VFIFPPS |
| | SLRLSCAA | WNSGALTSGVHTFPAVLQSS | ID NO: | LQMILNGINN | VGDRVTI | DEQLKSG |
| | SGFTESSY | GLYSLSSVVTVPSSSLGTQT | 23) | YKNPKLTRML | TCRASQS | TASVVCL |
| | WMHWVRQA | YICNVNHKPSNTKVDKKVEP | | TFKFYMPKKA | ISSSLAW | LNNFYPR |
| | PGKGLEWV | KSCDKTHTCPPCPAPEAAGA | | TELKHLQCLE | YQQKPGK | EAKVQWK |
| | SAISGSGG | PSVFLFPPKPKDTLMISRTP | | EELKPLEEAL | APKLLIY | VDNALQS |
| | STYYADSV | EVTCVVVDVSHEDPEVKENW | | NLAPSKNFHL | AASSLQS | GNSQESV |
| | KGRFTISR | YVDGVEVHNAKTKPREEQYN | | RPRDLISDIN | GVPSRFS | TEQDSKD |
| | DNSKNTLY | STYRVVSVLTVLHQDWLNGK | | VIVLELKGSE | GSGSGTD | STYSLSS |
| | LQMNSLRA | EYKCKVSNKALPAPIEKTIS | | TTFMCEYADE | FTLTISS | TLTLSKA |
| | EDTAVYYC | KAKGQPREPQVYTLPPSREE | | TATIVEFINR | LQPEDFA | DYEKHKV |
| | ARDRPYYY | MTKNQVSLTCLVKGFYPSDI | | WITFSQSIIS | TYYCQQY | YACEVTH |
| | IMDVWGKG | AVEWESNGQPENNYKTTPPV | | TLT (SEQ | KSYPVTF | QGLSSPV |
| | TTVTVSS | LDSDGSFFLYSKLTVDKSRW | | ID NO: 41) | GQGTKVE | TKSFNRG |
| | (SEQ ID | QQGNVFSCSVMHEALHNHYT | | | IK (SEQ | EC (SEQ |
| | NO: | QKSLSLSPG (SEQ ID | | | ID NO: | ID NO: |
| | 1398) | NO: 44) | | | 1367) | 45) |
| MIAB | EVQLLESG | ASTKGPSVFPLAPSSKSTSG | GGGGS | APTSSSTKKT | DIQMTQS | RTVAAPS |
| 194 | GGLVQPGG | GTAALGCLVKDYFPEPVTVS | (SEQ | QLQLEHLLLD | PSSLSAS | VFIFPPS |
| | SLRLSCAA | WNSGALTSGVHTFPAVLQSS | ID NO: | LQMILNGINN | VGDRVTI | DEQLKSG |
| | SGFTFSDF | GLYSLSSVVTVPSSSLGTQT | 23) | YKNPKLTRML | TCRASOS | TASVVCL |
| | WMHWVRQA | YICNVNHKPSNTKVDKKVEP | | TFKFYMPKKA | ISRSLAW | LNNFYPR |
| | PGKGLEWI | KSCDKTHTCPPCPAPEAAGA | | TELKHLQCLE | YQQKPGK | EAKVQWK |
| | SYISGDSG | PSVFLFPPKPKDTLMISRTP | | EELKPLEEAL | APKLLIY | VDNALQS |
| | YTNYADSV | EVTCVVVDVSHEDPEVKENW | | NLAPSKNFHL | AASSLQS | GNSQESV |
| | KGRFTISR | YVDGVEVHNAKTKPREEQYN | | RPRDLISDIN | GVPSRFS | TEQDSKD |
| | DNSKNTLY | STYRVVSVLTVLHQDWLNGK | | VIVLELKGSE | GSGSGTD | STYSLSS |
| | LQMNSLRA | EYKCKVSNKALPAPIEKTIS | | TTFMCEYADE | FTLTISS | TLTLSKA |
| | EDTAVYYC | KAKGQPREPQVYTLPPSREE | | TATIVEFINR | LQPEDFA | DYEKHKV |
| | ARDRPYYY | MTKNQVSLTCLVKGFYPSDI | | WITFSQSIIS | TYYCQQY | YACEVTH |
| | IMDVWGKG | AVEWESNGQPENNYKTTPPV | | TLT (SEQ | KSYPVTF | QGLSSPV |
| | TTVTVSS | LDSDGSFFLYSKLTVDKSRW | | ID NO: 41) | GQGTKVE | TKSFNRG |
| | (SEQ ID | QQGNVFSCSVMHEALHNHYT | | | IK (SEQ | EC (SEQ |
| | NO: | QKSLSLSPG (SEQ ID | | | ID NO: | ID NO: |
| | 1387) | NO: 44) | | | 1363) | 45) |
| MIAB | EVQLLESG | ASTKGPSVFPLAPSSKSTSG | GGGGS | APTSSSTKKT | DIQMTQS | RTVAAPS |
| 195 | GGLVQPGG | GTAALGCLVKDYFPEPVTVS | (SEQ | QLQLEHLLLD | PSSLSAS | VFIFPPS |
| | SLRLSCAA | WNSGALTSGVHTFPAVLQSS | ID NO: | LQMILNGINN | VGDRVTI | DEQLKSG |
| | SGFTFSDF | GLYSLSSVVTVPSSSLGTQT | 23) | YKNPKLTRML | TCRASQS | TASVVCL |
| | WMHWVRQA | YICNVNHKPSNTKVDKKVEP | | TFKFYMPKKA | VSSSLAW | LNNFYPR |
| | PGKGLEWI | KSCDKTHTCPPCPAPEAAGA | | TELKHLQCLE | YQQKPGK | EAKVQWK |
| | SYISGDSG | PSVFLFPPKPKDTLMISRTP | | EELKPLEEAL | APKLLIY | VDNALQS |
| | YTNYADSV | EVTCVVVDVSHEDPEVKENW | | NLAPSKNFHL | AASSLQS | GNSQESV |
| | KGRFTISR | YVDGVEVHNAKTKPREEQYN | | RPRDLISDIN | GVPSRES | TEQDSKD |
| | DNSKNTLY | STYRVVSVLTVLHQDWLNGK | | VIVLELKGSE | GSGSGTD | STYSLSS |
| | LQMNSLRA | EYKCKVSNKALPAPIEKTIS | | TTFMCEYADE | FTLTISS | TLTLSKA |
| | EDTAVYYC | KAKGQPREPQVYTLPPSREE | | TATIVEFINR | LQPEDFA | DYEKHKV |
| | ARDRPYYY | MTKNQVSLTCLVKGFYPSDI | | WITFSQSIIS | TYYCQQY | YACEVTH |
| | IMDVWGKG | AVEWESNGQPENNYKTTPPV | | TLT (SEQ | KSYPVTF | QGLSSPV |
| | TTVTVSS | LDSDGSFFLYSKLTVDKSRW | | ID NO: 41) | GQGTKVE | TKSFNRG |
| | (SEQ ID | QQGNVFSCSVMHEALHNHYT | | | IK (SEQ | EC (SEQ |
| | NO: | QKSLSLSPG (SEQ ID | | | ID NO: | ID NO: |
| | 1387) | NO: 44) | | | 1364) | 45) |
| MIAB | EVQLLESG | ASTKGPSVFPLAPSSKSTSG | GGGGS | APTSSSTKKT | DIQMTQS | RTVAAPS |
| 196 | GGLVQPGG | GTAALGCLVKDYFPEPVTVS | (SEQ | QLQLEHLLLD | PSSLSAS | VFIFPPS |
| | SLRLSCAA | WNSGALTSGVHTFPAVLQSS | ID NO: | LQMILNGINN | VGDRVTI | DEQLKSG |
| | SGFTFSDF | GLYSLSSVVTVPSSSLGTQT | 23) | YKNPKLTRML | TCRASOS | TASVVCL |
| | WMHWVRQA | YICNVNHKPSNTKVDKKVEP | | TFKFYMPKKA | ISSSLAW | LNNFYPR |
| | PGKGLEWI | KSCDKTHTCPPCPAPEAAGA | | TELKHLQCLE | YQQKPGK | EAKVQWK |
| | SYISGDSG | PSVFLFPPKPKDTLMISRTP | | EELKPLEEAL | APKLLIY | VDNALQS |
| | YTNYADSV | EVTCVVVDVSHEDPEVKENW | | NLAPSKNFHL | AASSLQS | GNSQESV |
| | KGRFTISR | YVDGVEVHNAKTKPREEQYN | | RPRDLISDIN | GVPSRFS | TEQDSKD |
| | DNSKNTLY | STYRVVSVLTVLHQDWLNGK | | VIVLELKGSE | GSGSGTD | STYSLSS |
| | LQMNSLRA | EYKCKVSNKALPAPIEKTIS | | TTFMCEYADE | FTLTISS | TLTLSKA |
| | EDTAVYYC | KAKGQPREPQVYTLPPSREE | | TATIVEFINR | LQPEDFA | DYEKHKV |
| | ARDRPYYY | MTKNQVSLTCLVKGFYPSDI | | WITFSQSIIS | TYYCQQY | YACEVTH |
| | IMDVWGKG | AVEWESNGQPENNYKTTPPV | | TLT (SEQ | KSYPVTF | QGLSSPV |
| | TTVTVSS | LDSDGSFFLYSKLTVDKSRW | | ID NO: 41) | GQGTKVE | TKSFNRG |
| | (SEQ ID | QQGNVFSCSVMHEALHNHYT | | | IK (SEQ | EC (SEQ |
| | NO: | QKSLSLSPG (SEQ ID | | | ID NO: | ID NO: |
| | 1387) | NO: 44) | | | 1367) | 45) |
| MIAB | EVQLLESG | ASTKGPSVFPLAPSSKSTSG | GGGGS | APTSSSTKKT | DIQMTQS | RTVAAPS |
| 197 | GGLVQPGG | GTAALGCLVKDYFPEPVTVS | (SEQ | QLQLEHLLLD | PSSLSAS | VFIFPPS |
| | SLRLSCAA | WNSGALTSGVHTFPAVLQSS | ID NO: | LQMILNGINN | VGDRVTI | DEQLKSG |
| | SGFTFSDF | GLYSLSSVVTVPSSSLGTQT | 23) | YKNPKLTRML | TCRASQS | TASVVCL |
| | WMHWVRQA | YICNVNHKPSNTKVDKKVEP | | TFKFYMPKKA | ISRSLAW | LNNFYPR |
| | PGKGLEWI | KSCDKTHTCPPCPAPEAAGA | | TELKHLQCLE | YQQKPGK | EAKVQWK |
| | SYISGDSG | PSVFLFPPKPKDTLMISRTP | | EELKPLEEAL | APKLLIY | VDNALQS |
| | YTNYADSV | EVTCVVVDVSHEDPEVKENW | | NLAPSKNFHL | AASSLQS | GNSQESV |
| | KGRFTISR | YVDGVEVHNAKTKPREEQYN | | RPRDLISDIN | GVPSRES | TEQDSKD |
| | DNSKNTLY | STYRVVSVLTVLHQDWLNGK | | VIVLELKGSE | GSGSGTD | STYSLSS |
| | LQMNSLRA | EYKCKVSNKALPAPIEKTIS | | TTFMCEYADE | FTLTISS | TLTLSKA |
| | EDTAVYYC | KAKGQPREPQVYTLPPSREE | | TATIVEFINR | LQPEDFA | DYEKHKV |
| | ARDRPYYY | MTKNQVSLTCLVKGFYPSDI | | WITFSQSIIS | TYYCQQY | YACEVTH |
| | IMDVWGKG | AVEWESNGQPENNYKTTPPV | | TLT (SEQ | KSYPVTF | QGLSSPV |
| | TTVTVSS | LDSDGSFFLYSKLTVDKSRW | | ID NO: 41) | GQGTKVE | TKSFNRG |
| | (SEQ ID | QQGNVFSCSVMHEALHNHYT | | | IK (SEQ | EC (SEQ |
| | NO: | QKSLSLSPG (SEQ ID | | | ID NO: | ID NO: |
| | 1387) | NO: 44) | | | 1363) | 45) |
| MIAB | EVQLLESG | ASTKGPSVFPLAPSSKSTSG | GGGGS | APTSSSTKKT | DIQMTQS | RTVAAPS |
| 198 | GGLVQPGG | GTAALGCLVKDYFPEPVTVS | (SEQ | QLQLEHLLLD | PSSLSAS | VFIFPPS |
| | SLRLSCAA | WNSGALTSGVHTFPAVLQSS | ID NO: | LQMILNGINN | VGDRVTI | DEQLKSG |
| | SGFTFSDF | GLYSLSSVVTVPSSSLGTQT | 23) | YKNPKLTRML | TCRASOS | TASVVCL |
| | WMHWVRQA | YICNVNHKPSNTKVDKKVEP | | TFKFYMPKKA | VSRSLAW | LNNFYPR |
| | PGKGLEWI | KSCDKTHTCPPCPAPEAAGA | | TELKHLQCLE | YQQKPGK | EAKVQWK |
| | SYISGDSG | PSVFLFPPKPKDTLMISRTP | | EELKPLEEAL | APKLLIY | VDNALQS |
| | YTNYADSV | EVTCVVVDVSHEDPEVKENW | | NLAPSKNFHL | AASSLQS | GNSQESV |
| | KGRFTISR | YVDGVEVHNAKTKPREEQYN | | RPRDLISDIN | GVPSRFS | TEQDSKD |
| | DNSKNTLY | STYRVVSVLTVLHQDWLNGK | | VIVLELKGSE | GSGSGTD | STYSLSS |
| | LQMNSLRA | EYKCKVSNKALPAPIEKTIS | | TTFMCEYADE | FTLTISS | TLTLSKA |
| | EDTAVYYC | KAKGQPREPQVYTLPPSREE | | TATIVEFINR | LQPEDFA | DYEKHKV |
| | ARDRPYYY | MTKNQVSLTCLVKGFYPSDI | | WITFSQSIIS | TYYCQQY | YACEVTH |
| | IMDVWGKG | AVEWESNGQPENNYKTTPPV | | TLT (SEQ | KSYPVTF | QGLSSPV |
| | TTVTVSS | LDSDGSFFLYSKLTVDKSRW | | ID NO: 41) | GQGTKVE | TKSFNRG |
| | (SEQ ID | QQGNVFSCSVMHEALHNHYT | | | IK (SEQ | EC (SEQ |
| | NO: | QKSLSLSPG (SEQ ID | | | ID NO: | ID NO: |
| | 1387) | NO: 44) | | | 592) | 45) |
| PRNT | EVQLLESG | ASTKGPSVFPLAPSSKSTSG | GGGGS | APTSSSTKKT | DIQMTQS | RTVAAPS |
| 1 | GGLVQPGG | GTAALGCLVKDYFPEPVTVS | (SEQ | QLQLEHLLLD | PSSLSAS | VFIFPPS |
| | SLRLSCAA | WNSGALTSGVHTFPAVLQSS | ID NO: | LQMILNGINN | VGDRVTI | DEQLKSG |
| | SGFTFSDF | GLYSLSSVVTVPSSSLGTQT | 23) | YKNPKLTRML | TCRASQS | TASVVCL |
| | WMHWVRQA | YICNVNHKPSNTKVDKKVEP | | TFKFYMPKKA | VSRSLAW | LNNFYPR |
| | PGKGLEWI | KSCDKTHTCPPCPAPEAAGA | | TELKHLQCLE | YQQKPGK | EAKVQWK |
| | SYISGDSG | PSVFLFPPKPKDTLMISRTP | | EELKPLEEAL | APKLLIY | VDNALQS |
| | YTNYADSV | EVTCVVVDVSHEDPEVKENW | | NLAPSKNFHL | AASSLQS | GNSQESV |
| | KGRFTISR | YVDGVEVHNAKTKPREEQYN | | RPRDLISDIN | GVPSRFS | TEQDSKD |
| | DNSKNTLY | STYRVVSVLTVLHQDWLNGK | | VIVLELKGSE | GSGSGTD | STYSLSS |
| | LQMNSLRA | EYKCKVSNKALPAPIEKTIS | | TTFMCEYADE | FTLTISS | TLTLSKA |
| | EDTAVYYC | KAKGQPREPQVYTLPPSREE | | TATIVEFINR | LQPEDFA | DYEKHKV |
| | ARDRPYYY | MTKNQVSLTCLVKGFYPSDI | | WITFSQSIIS | TYYCQQY | YACEVTH |
| | YMDVWGKG | AVEWESNGQPENNYKTTPPV | | TLT (SEQ | KSYPVTF | QGLSSPV |
| | TTVTVSS | LDSDGSFFLYSKLTVDKSRW | | ID NO: 41) | GQGTKVE | TKSFNRG |
| | (SEQ ID | QQGNVFSCSVMHEALHNHYT | | | IK (SEQ | EC (SEQ |
| | NO: 591) | QKSLSLSPG (SEQ ID | | | ID NO: | ID NO: |
| | | NO: 44) | | | 592) | 45) |

[0371] In some embodiments, the therapeutic compound comprises one or more sequences, or a combination thereof, selected from the Table 10. In some embodiments, the therapeutic compound comprises the peptides of SEQ ID NOs: 1387, 44, 23, 41, 1363, and 45.

[0372] In additional embodiments, the MAdCAM antibody comprises an IL-2 mutein fused to the N-terminus of an Fc heavy chain, wherein the Fc is further fused at its C-terminus to a MAdCAM scFv, and has one or more of the sequences as set forth in the following table

TABLE 11

| | | IL-2M- | | | | | |
|---|---|---|---|---|---|---|---|
| | | Fc | | | | Intra | |
| | | Linker | | Fc-scFv | ScFv VH | scFv | ScFv VK |
| Ab | IL-2M Seq | Seq | Fc Domain Seq | Linker | Seq | Linker | Seq |
| MIAB | APTSSSTKK | GGGGSGG | DKTHTCPPCPAPEA | GGGGS | EVQLLESG | GGGGSG | DIQMTQS |
| 199 | TQLQLEHLL | GGSGGGG | AGAPSVFLFPPKPK | (SEQ ID | GGLVQPGG | GGGSGG | PSSLSAS |
| | LDLQMILNG | S (SEQ | DTLMISRTPEVTCV | NO: 23) | SLRLSCAA | GGSGGG | VGDRVTI |
| | INNYKNPKL | ID NO: | VVDVSHEDPEVKFN | | SGFTFSDF | GS | TCRASQS |
| | TRMLTFKFY | 30) | WYVDGVEVHNAKTK | | WMHWVRQA | (SEQ | VSRSLAW |
| | MPKKATELK | | PREEQYNSTYRVVS | | PGKGLEWI | ID NO: | YQQKPGK |
| | HLQCLEEEL | | VLTVLHQDWLNGKE | | SYISGDSG | 22) | APKLLIY |
| | KPLEEALNL | | YKCKVSNKALPAPI | | YTNYADSV | | AASSLQS |
| | APSKNFHLR | | EKTISKAKGQPREP | | KGRFTISR | | GVPSRFS |
| | PRDLISDIN | | QVYTLPPSREEMTK | | DNSKNTLY | | GSGSGTD |
| | VIVLELKGS | | NQVSLTCLVKGFYP | | LQMNSLRA | | FTLTISS |
| | ETTFMCEYA | | SDIAVEWESNGQPE | | EDTAVYYC | | LQPEDFA |
| | DETATIVEF | | NNYKTTPPVLDSDG | | ARDRPYYY | | TYYCQQY |
| | INRWITFSQ | | SFFLYSKLTVDKSR | | YMDVWGKG | | KSYPVTF |
| | SIISTLT | | WQQGNVFSCSVMHE | | TTVTVSS | | GQGTKVE |
| | (SEQ ID | | ALHNHYTQKSLSLS | | (SEQ ID | | IK (SEQ |
| | NO: 41) | | PG (SEQ ID NO: | | NO: 591) | | ID NO: |
| | | | 21) | | | | 592) |
| MIAB | APTSSSTKK | GGGGSGG | DKTHTCPPCPAPEA | GGGGSGG | EVQLLESG | GGGGSG | DIQMTQS |
| 200 | TQLQLEHLL | GGSGGGG | AGAPSVFLFPPKPK | GGS | GGLVQPGG | GGGSGG | PSSLSAS |
| | LDLQMILNG | S (SEQ | DTLMISRTPEVTCV | (SEQ ID | SLRLSCAA | GGSGGG | VGDRVTI |
| | INNYKNPKL | ID NO: | VVDVSHEDPEVKFN | NO: | SGFTFSDF | GS | TCRASQS |
| | TRMLTFKFY | 30) | WYVDGVEVHNAKTK | 619) | WMHWVRQA | (SEQ | VSRSLAW |
| | MPKKATELK | | PREEQYNSTYRVVS | | PGKGLEWI | ID NO: | YQQKPGK |
| | HLQCLEEEL | | VLTVLHQDWLNGKE | | SYISGDSG | 22) | APKLLIY |
| | KPLEEALNL | | YKCKVSNKALPAPI | | YTNYADSV | | AASSLQS |
| | APSKNFHLR | | EKTISKAKGQPREP | | KGRFTISR | | GVPSRFS |
| | PRDLISDIN | | QVYTLPPSREEMTK | | DNSKNTLY | | GSGSGTD |
| | VIVLELKGS | | NQVSLTCLVKGFYP | | LQMNSLRA | | FTLTISS |
| | ETTFMCEYA | | SDIAVEWESNGQPE | | EDTAVYYC | | LQPEDFA |
| | DETATIVEF | | NNYKTTPPVLDSDG | | ARDRPYYY | | TYYCQQY |
| | INRWITFSQ | | SFFLYSKLTVDKSR | | YMDVWGKG | | KSYPVTF |
| | SIISTLT | | WQQGNVFSCSVMHE | | TTVTVSS | | GQGTKVE |
| | (SEQ ID | | ALHNHYTQKSLSLS | | (SEQ ID | | IK (SEQ |
| | NO: 41) | | PG (SEQ ID NO: | | NO: 591) | | ID NO: |
| | | | 21) | | | | 592) |
| MIAB | APTSSSTKK | GGGGSGG | DKTHTCPPCPAPEA | GGGGSGG | EVQLLESG | GGGGSG | DIQMTQS |
| 201 | TQLQLEHLL | GGSGGGG | AGAPSVFLFPPKPK | GGSGGGG | GGLVQPGG | GGGSGG | PSSLSAS |
| | LDLQMILNG | S (SEQ | DTLMISRTPEVTCV | S (SEQ | SLRLSCAA | GGSGGG | VGDRVTI |
| | INNYKNPKL | ID NO: | VVDVSHEDPEVKFN | ID NO: | SGFTFSDF | GS | TCRASQS |
| | TRMLTFKFY | 30) | WYVDGVEVHNAKTK | 30) | WMHWVRQA | (SEQ | VSRSLAW |
| | MPKKATELK | | PREEQYNSTYRVVS | | PGKGLEWI | ID NO: | YQQKPGK |
| | HLQCLEEEL | | VLTVLHQDWLNGKE | | SYISGDSG | 22) | APKLLIY |
| | KPLEEALNL | | YKCKVSNKALPAPI | | YTNYADSV | | AASSLQS |
| | APSKNFHLR | | EKTISKAKGQPREP | | KGRFTISR | | GVPSRFS |
| | PRDLISDIN | | QVYTLPPSREEMTK | | DNSKNTLY | | GSGSGTD |
| | VIVLELKGS | | NQVSLTCLVKGFYP | | LQMNSLRA | | FTLTISS |
| | ETTFMCEYA | | SDIAVEWESNGQPE | | EDTAVYYC | | LQPEDFA |
| | DETATIVEF | | NNYKTTPPVLDSDG | | ARDRPYYY | | TYYCQQY |
| | INRWITFSQ | | SFFLYSKLTVDKSR | | YMDVWGKG | | KSYPVTF |
| | SIISTLT | | WQQGNVFSCSVMHE | | TTVTVSS | | GQGTKVE |
| | (SEQ ID | | ALHNHYTQKSLSLS | | (SEQ ID | | IK (SEQ |
| | NO: 41) | | PG (SEQ ID NO: | | NO: 591) | | ID NO: |
| | | | 21) | | | | 592) |
| MIAB | APTSSSTKK | GGGGSGG | DKTHTCPPCPAPEA | GGGGS | EVQLLESG | GGGGSG | DIQMTQS |
| 202 | TQLQLEHLL | GGSGGGG | AGAPSVFLFPPKPK | (SEQ ID | GGLVQPGG | GGGSGG | PSSLSAS |
| | LDLQMILNG | SGGGGS | DTLMISRTPEVTCV | NO: 23) | SLRLSCAA | GGSGGG | VGDRVTI |
| | INNYKNPKL | (SEQ ID | VVDVSHEDPEVKFN | | SGFTFSDF | GS | TCRASQS |
| | TRMLTFKFY | NO: 22) | WYVDGVEVHNAKTK | | WMHWVRQA | SEQ | VSRSLAW |
| | MPKKATELK | | PREEQYNSTYRVVS | | PGKGLEWI | ID NO: | YQQKPGK |
| | HLQCLEEEL | | VLTVLHQDWLNGKE | | SYISGDSG | 22) | APKLLIY |
| | KPLEEALNL | | YKCKVSNKALPAPI | | YTNYADSV | | AASSLQS |
| | APSKNFHLR | | EKTISKAKGQPREP | | KGRFTISR | | GVPSRFS |
| | PRDLISDIN | | QVYTLPPSREEMTK | | DNSKNTLY | | GSGSGTD |
| | VIVLELKGS | | NQVSLTCLVKGFYP | | LQMNSLRA | | FTLTISS |
| | ETTFMCEYA | | SDIAVEWESNGQPE | | EDTAVYYC | | LQPEDFA |
| | DETATIVEF | | NNYKTTPPVLDSDG | | ARDRPYYY | | TYYCQQY |
| | INRWITFSQ | | SFFLYSKLTVDKSR | | YMDVWGKG | | KSYPVTF |
| | SIISTLT | | WQQGNVFSCSVMHE | | TTVTVSS | | GQGTKVE |
| | (SEQ ID | | ALHNHYTQKSLSLS | | (SEQ ID | | IK (SEQ |
| | NO: 41) | | PG (SEQ ID NO: | | NO: 591) | | ID NO: |
| | | | 21) | | | | 592) |
| MIAB | APTSSSTKK | GGGGSGG | DKTHTCPPCPAPEA | GGGGSGG | EVQLLESG | GGGGSG | DIQMTQS |
| 203 | TQLQLEHLL | GGSGGGG | AGAPSVFLFPPKPK | GGS | GGLVQPGG | GGGSGG | PSSLSAS |
| | LDLQMILNG | SGGGGS | DTLMISRTPEVTCV | (SEQ ID | SLRLSCAA | GGSGGG | VGDRVTI |
| | INNYKNPKL | (SEQ ID | VVDVSHEDPEVKFN | NO: | SGFTFSDF | GS | TCRASQS |
| | TRMLTFKFY | NO: 22) | WYVDGVEVHNAKTK | 619) | WMHWVRQA | (SEQ | VSRSLAW |
| | MPKKATELK | | PREEQYNSTYRVVS | | PGKGLEWI | ID NO: | YQQKPGK |
| | HLQCLEEEL | | VLTVLHQDWLNGKE | | SYISGDSG | 22) | APKLLIY |
| | KPLEEALNL | | YKCKVSNKALPAPI | | YTNYADSV | | AASSLQS |
| | APSKNFHLR | | EKTISKAKGQPREP | | KGRFTISR | | GVPSRFS |
| | PRDLISDIN | | QVYTLPPSREEMTK | | DNSKNTLY | | GSGSGTD |
| | VIVLELKGS | | NQVSLTCLVKGFYP | | LQMNSLRA | | FTLTISS |
| | ETTFMCEYA | | SDIAVEWESNGQPE | | EDTAVYYC | | LQPEDFA |
| | DETATIVEF | | NNYKTTPPVLDSDG | | ARDRPYYY | | TYYCQQY |
| | INRWITFSQ | | SFFLYSKLTVDKSR | | YMDVWGKG | | KSYPVTF |
| | SIISTLT | | WQQGNVFSCSVMHE | | TTVTVSS | | GQGTKVE |
| | (SEQ ID | | ALHNHYTQKSLSLS | | (SEQ ID | | IK (SEQ |
| | NO: 41) | | PG (SEQ ID NO: | | NO: 591) | | ID NO: |
| | | | 21) | | | | 592) |
| MIAB | APTSSSTKK | GGGGSGG | DKTHTCPPCPAPEA | GGGGSGG | EVQLLESG | GGGGSG | DIQMTQS |
| 204 | TQLQLEHLL | GGSGGGG | AGAPSVFLFPPKPK | GGSGGGG | GGLVQPGG | GGGSGG | PSSLSAS |
| | LDLQMILNG | SGGGGS | DTLMISRTPEVTCV | S (SEQ | SLRLSCAA | GGSGGG | VGDRVTI |
| | INNYKNPKL | (SEQ ID | VVDVSHEDPEVKFN | ID NO: | SGFTFSDF | GS | TCRASQS |
| | TRMLTFKFY | NO: 22) | WYVDGVEVHNAKTK | 30) | WMHWVRQA | (SEQ | VSRSLAW |
| | MPKKATELK | | PREEQYNSTYRVVS | | PGKGLEWI | ID NO: | YQQKPGK |
| | HLQCLEEEL | | VLTVLHQDWLNGKE | | SYISGDSG | 22) | APKLLIY |
| | KPLEEALNL | | YKCKVSNKALPAPI | | YTNYADSV | | AASSLQS |
| | APSKNFHLR | | EKTISKAKGQPREP | | KGRFTISR | | GVPSRFS |
| | PRDLISDIN | | QVYTLPPSREEMTK | | DNSKNTLY | | GSGSGTD |
| | VIVLELKGS | | NQVSLTCLVKGFYP | | LQMNSLRA | | FTLTISS |
| | ETTFMCEYA | | SDIAVEWESNGQPE | | EDTAVYYC | | LQPEDFA |
| | DETATIVEF | | NNYKTTPPVLDSDG | | ARDRPYYY | | TYYCQQY |
| | INRWITFSQ | | SFFLYSKLTVDKSR | | YMDVWGKG | | KSYPVTF |
| | SIISTLT | | WQQGNVFSCSVMHE | | TTVTVSS | | GQGTKVE |
| | (SEQ ID | | ALHNHYTQKSLSLS | | (SEQ ID | | IK (SEQ |
| | NO: 41) | | PG (SEQ ID NO: | | NO: 591) | | ID NO: |
| | | | 21) | | | | 592) |
| MIAB | APTSSSTKK | GGGGSGG | DKTHTCPPCPAPEA | GGGGSGG | EVQLLESG | GGGGSG | DIQMTQS |
| 212 | TQLQLEHLL | GGSGGGG | AGAPSVFLFPPKPK | GGSGGGG | GGLVQPGG | GGGSGG | PSSLSAS |
| | LDLQMILNG | S (SEQ | DTLMISRTPEVTCV | S (SEQ | SLRLSCAA | GGSGGG | VGDRVTI |
| | INNYKNPKL | ID NO: | VVDVSHEDPEVKFN | ID NO: | SGFTFSSY | GS | TCRASQS |
| | TRMLTFKFY | 30) | WYVDGVEVHNAKTK | 30) | WMHWVRQA | (SEQ | ISSSLAW |
| | MPKKATELK | | PREEQYNSTYRVVS | | PGKGLEWV | ID NO: | YQQKPGK |
| | HLQCLEEEL | | VLTVLHQDWLNGKE | | SYISGSGG | 22) | APKLLIY |
| | KPLEEALNL | | YKCKVSNKALPAPI | | YTNYADSV | | AASSLQS |
| | APSKNFHLR | | EKTISKAKGQPREP | | KGRFTISR | | GVPSRFS |
| | PRDLISDIN | | QVYTLPPSREEMTK | | DNSKNTLY | | GSGSGTD |
| | VIVLELKGS | | NQVSLTCLVKGFYP | | LQMNSLRA | | FTLTISS |
| | ETTFMCEYA | | SDIAVEWESNGQPE | | EDTAVYYC | | LQPEDFA |
| | DETATIVEF | | NNYKTTPPVLDSDG | | ARDRPYYY | | TYYCQQY |
| | INRWITFSQ | | SFFLYSKLTVDKSR | | DMDVWGKG | | KSYPVTF |
| | SIISTLT | | WQQGNVFSCSVMHE | | TTVTVSS | | GQGTKVE |
| | (SEQ ID | | ALHNHYTQKSLSLS | | (SEQ ID | | IK (SEQ |
| | NO: 41) | | PG (SEQ ID NO: | | NO: | | ID NO: |
| | | | 21) | | 1445) | | 1367) |
| MIAB | APTSSSTKK | GGGGSGG | DKTHTCPPCPAPEA | GGGGSGG | EVQLLESG | GGGGSG | DIQMTQS |
| 213 | TQLQLEHLL | GGSGGGG | AGAPSVFLFPPKPK | GGSGGGG | GGLVQPGG | GGGSGG | PSSLSAS |
| | LDLQMILNG | S (SEQ | DTLMISRTPEVTCV | S (SEQ | SLRLSCAA | GGSGGG | VGDRVTI |
| | INNYKNPKL | ID NO: | VVDVSHEDPEVKFN | ID NO: | SGFTFSSY | GS | TCRASQS |
| | TRMLTFKFY | 30) | WYVDGVEVHNAKTK | 30) | WMHWVRQA | (SEQ | ISSSLAW |
| | MPKKATELK | | PREEQYNSTYRVVS | | PGKGLEWV | ID NO: | YQQKPGK |
| | HLQCLEEEL | | VLTVLHQDWLNGKE | | SYISGSGG | 22) | APKLLIY |
| | KPLEEALNL | | YKCKVSNKALPAPI | | YTNYADSV | | AASSLQS |
| | APSKNFHLR | | EKTISKAKGQPREP | | KGRFTISR | | GVPSRFS |
| | PRDLISDIN | | QVYTLPPSREEMTK | | DNSKNTLY | | GSGSGTD |
| | VIVLELKGS | | NQVSLTCLVKGFYP | | LQMNSLRA | | FTLTISS |
| | ETTFMCEYA | | SDIAVEWESNGQPE | | EDTAVYYC | | LQPEDFA |
| | DETATIVEF | | NNYKTTPPVLDSDG | | ARDRPYYY | | TYYCQQY |
| | INRWITFSQ | | SFFLYSKLTVDKSR | | DIDVWGKG | | KSYPVTF |
| | SIISTLT | | WQQGNVFSCSVMHE | | TTVTVSS | | GQGTKVE |
| | (SEQ ID | | ALHNHYTQKSLSLS | | (SEQ ID | | IK (SEQ |
| | NO: 41) | | PG (SEQ ID NO: | | NO: | | ID NO: |
| | | | 21) | | 1477) | | 1367) |
| MIAB | APTSSSTKK | GGGGSGG | DKTHTCPPCPAPEA | GGGGSGG | EVQLLESG | GGGGSG | DIQMTQS |
| 214 | TQLQLEHLL | GGSGGGG | AGAPSVFLFPPKPK | GGSGGGG | GGLVQPGG | GGGSGG | PSSLSAS |
| | LDLQMILNG | S (SEQ | DTLMISRTPEVTCV | S (SEQ | SLRLSCAA | GGSGGG | VGDRVTI |
| | INNYKNPKL | ID NO: | VVDVSHEDPEVKFN | ID NO: | SGFTFSSY | GS | TCRASQS |
| | TRMLTFKFY | 30) | WYVDGVEVHNAKTK | 30) | WMHWVRQA | (SEQ | ISSSLAW |
| | MPKKATELK | | PREEQYNSTYRVVS | | PGKGLEWV | ID NO: | YQQKPGK |
| | HLQCLEEEL | | VLTVLHQDWLNGKE | | SYISGSGG | 22) | APKLLIY |
| | KPLEEALNL | | YKCKVSNKALPAPI | | YTNYADSV | | AASSLQS |
| | APSKNFHLR | | EKTISKAKGQPREP | | KGRFTISR | | GVPSRFS |
| | PRDLISDIN | | QVYTLPPSREEMTK | | DNSKNTLY | | GSGSGTD |
| | VIVLELKGS | | NQVSLTCLVKGFYP | | LQMNSLRA | | FTLTISS |
| | ETTFMCEYA | | SDIAVEWESNGQPE | | EDTAVYYC | | LQPEDFA |
| | DETATIVEF | | NNYKTTPPVLDSDG | | ARDRPYYY | | TYYCQQY |
| | INRWITFSQ | | SFFLYSKLTVDKSR | | DLDVWGKG | | KSYPVTF |
| | SIISTLT | | WQQGNVFSCSVMHE | | TTVTVSS | | GQGTKVE |
| | (SEQ ID | | ALHNHYTQKSLSLS | | (SEQ ID | | IK (SEQ |
| | NO: 41) | | PG (SEQ ID NO: | | NO: | | ID NO: |
| | | | 21) | | 1480) | | 1367) |
| MIAB | APTSSSTKK | GGGGSGG | DKTHTCPPCPAPEA | GGGGSGG | EVQLLESG | GGGGSG | DIQMTQS |
| 215 | TQLQLEHLL | GGSGGGG | AGAPSVFLFPPKPK | GGSGGGG | GGLVQPGG | GGGSGG | PSSLSAS |
| | LDLQMILNG | S (SEQ | DTLMISRTPEVTCV | S (SEQ | SLRLSCAA | GGSGGG | VGDRVTI |
| | INNYKNPKL | ID NO: | VVDVSHEDPEVKFN | ID NO: | SGFTFSSY | GS | TCRASQS |
| | TRMLTFKFY | 30) | WYVDGVEVHNAKTK | 30) | WMHWVRQA | (SEQ | ISSSLAW |
| | MPKKATELK | | PREEQYNSTYRVVS | | PGKCLEWV | ID NO: | YQQKPGK |
| | HLQCLEEEL | | VLTVLHQDWLNGKE | | SYISGSGG | 22) | APKLLIY |
| | KPLEEALNL | | YKCKVSNKALPAPI | | YTNYADSV | | AASSLQS |
| | APSKNFHLR | | EKTISKAKGQPREP | | KGRFTISR | | GVPSRFS |
| | PRDLISDIN | | QVYTLPPSREEMTK | | DNSKNTLY | | GSGSGTD |
| | VIVLELKGS | | NQVSLTCLVKGFYP | | LQMNSLRA | | FTLTISS |
| | ETTFMCEYA | | SDIAVEWESNGQPE | | EDTAVYYC | | LQPEDFA |
| | DETATIVEF | | NNYKTTPPVLDSDG | | ARDRPYYY | | TYYCQQY |
| | INRWITFSQ | | SFFLYSKLTVDKSR | | DMDVWGKG | | KSYPVTF |
| | SIISTLT | | WQQGNVFSCSVMHE | | TTVTVSS | | GCGTKVE |
| | (SEQ ID | | ALHNHYTQKSLSLS | | (SEQ ID | | IK (SEQ |
| | NO: 41) | | PG (SEQ ID NO: | | NO: | | ID NO: |
| | | | 21) | | 1542) | | 1543) |
| MIAB | APTSSSTKK | GGGGSGG | DKTHTCPPCPAPEA | GGGGSGG | EVQLLESG | GGGGSG | DIQMTQS |
| 216 | TQLQLEHLL | GGSGGGG | AGAPSVFLFPPKPK | GGSGGGG | GGLVQPGG | GGGSGG | PSSLSAS |
| | LDLQMILNG | S (SEQ | DTLMISRTPEVTCV | S (SEQ | SLRLSCAA | GGSGGG | VGDRVTI |
| | INNYKNPKL | ID NO: | VVDVSHEDPEVKFN | ID NO: | SGFTFSSY | GS | TCRASQS |
| | TRMLTFKFY | 30) | WYVDGVEVHNAKTK | 30) | WMHWVRQA | (SEQ | ISSSLAW |
| | MPKKATELK | | PREEQYNSTYRVVS | | PGKCLEWV | ID NO: | YQQKPGK |
| | HLQCLEEEL | | VLTVLHQDWLNGKE | | SYISGSGG | 22) | APKLLIY |
| | KPLEEALNL | | YKCKVSNKALPAPI | | YTNYADSV | | AASSLQS |
| | APSKNFHLR | | EKTISKAKGQPREP | | KGRFTISR | | GVPSRFS |
| | PRDLISDIN | | QVYTLPPSREEMTK | | DNSKNTLY | | GSGSGTD |
| | VIVLELKGS | | NQVSLTCLVKGFYP | | LQMNSLRA | | FTLTISS |
| | ETTFMCEYA | | SDIAVEWESNGQPE | | EDTAVYYC | | LQPEDFA |
| | DETATIVEF | | NNYKTTPPVLDSDG | | ARDRPYYY | | TYYCQQY |
| | INRWITFSQ | | SFFLYSKLTVDKSR | | DIDVWGKG | | KSYPVTF |
| | SIISTLT | | WQQGNVFSCSVMHE | | TTVTVSS | | GCGTKVE |
| | (SEQ ID | | ALHNHYTQKSLSLS | | (SEQ ID | | IK (SEQ |
| | NO: 41) | | PG (SEQ ID NO: | | NO: | | ID NO: |
| | | | 21) | | 1544) | | 1543) |
| MIAB | APTSSSTKK | GGGGSGG | DKTHTCPPCPAPEA | GGGGSGG | EVQLLESG | GGGGSG | DIQMTQS |
| 217 | TQLQLEHLL | GGSGGGG | AGAPSVFLFPPKPK | GGSGGGG | GGLVQPGG | GGGSGG | PSSLSAS |
| | LDLQMILNG | S (SEQ | DTLMISRTPEVTCV | S (SEQ | SLRLSCAA | GGSGGG | VGDRVTI |
| | INNYKNPKL | ID NO: | VVDVSHEDPEVKFN | ID NO: | SGFTFSSY | GS | TCRASQS |
| | TRMLTFKFY | 30) | WYVDGVEVHNAKTK | 30) | WMHWVRQA | (SEQ | ISSSLAW |
| | MPKKATELK | | PREEQYNSTYRVVS | | PGKCLEWV | ID NO: | YQQKPGK |
| | HLQCLEEEL | | VLTVLHQDWLNGKE | | SYISGSGG | 22) | APKLLIY |
| | KPLEEALNL | | YKCKVSNKALPAPI | | YTNYADSV | | AASSLQS |
| | APSKNFHLR | | EKTISKAKGQPREP | | KGRFTISR | | GVPSRFS |
| | PRDLISDIN | | QVYTLPPSREEMTK | | DNSKNTLY | | GSGSGTD |
| | VIVLELKGS | | NQVSLTCLVKGFYP | | LQMNSLRA | | FTLTISS |
| | ETTFMCEYA | | SDIAVEWESNGQPE | | EDTAVYYC | | LQPEDFA |
| | DETATIVEF | | NNYKTTPPVLDSDG | | ARDRPYYY | | TYYCQQY |
| | INRWITFSQ | | SFFLYSKLTVDKSR | | DLDVWGKG | | KSYPVTF |
| | SIISTLT | | WQQGNVFSCSVMHE | | TTVTVSS | | GCGTKVE |
| | (SEQ ID | | ALHNHYTQKSLSLS | | (SEQ ID | | IK (SEQ |
| | NO: 41) | | PG (SEQ ID NO: | | NO: | | ID NO: |
| | | | 21) | | 1545) | | 1543) |
| MIAB | APTSSSTKK | GGGGSGG | DKTHTCPPCPAPEA | GGGSEGG | EVQLLESG | GGGGSG | DIQMTQS |
| 218 | TQLQLEHLL | GGSGGGG | AGAPSVFLFPPKPK | GSEGGGS | GGLVQPGG | GGGSGG | PSSLSAS |
| | LDLQMILNG | S (SEQ | DTLMISRTPEVTCV | E (SEQ | SLRLSCAA | GGSGGG | VGDRVTI |
| | INNYKNPKL | ID NO: | VVDVSHEDPEVKFN | ID NO: | SGFTFSSY | GS | TCRASQS |
| | TRMLTFKFY | 30) | WYVDGVEVHNAKTK | 1546) | WMHWVRQA | (SEQ | ISSSLAW |
| | MPKKATELK | | PREEQYNSTYRVVS | | PGKGLEWV | ID NO: | YQQKPGK |
| | HLQCLEEEL | | VLTVLHQDWLNGKE | | SYISGSGG | 22) | APKLLIY |
| | KPLEEALNL | | YKCKVSNKALPAPI | | YTNYADSV | | AASSLQS |
| | APSKNFHLR | | EKTISKAKGQPREP | | KGRFTISR | | GVPSRFS |
| | PRDLISDIN | | QVYTLPPSREEMTK | | DNSKNTLY | | GSGSGTD |
| | VIVLELKGS | | NQVSLTCLVKGFYP | | LQMNSLRA | | FTLTISS |
| | ETTFMCEYA | | SDIAVEWESNGQPE | | EDTAVYYC | | LQPEDFA |
| | DETATIVEF | | NNYKTTPPVLDSDG | | ARDRPYYY | | TYYCQQY |
| | INRWITFSQ | | SFFLYSKLTVDKSR | | DMDVWGKG | | KSYPVTF |
| | SIISTLT | | WQQGNVFSCSVMHE | | TTVTVSS | | GQGTKVE |
| | (SEQ ID | | ALHNHYTQKSLSLS | | (SEQ ID | | IK (SEQ |
| | NO: 41) | | PG (SEQ ID NO: | | NO: | | ID NO: |
| | | | 21) | | 1445) | | 1367) |
| MIAB | APTSSSTKK | GGGGSGG | DKTHTCPPCPAPEA | GGGSEGG | EVQLLESG | GGGGSG | DIQMTQS |
| 219 | TQLQLEHLL | GGSGGGG | AGAPSVFLFPPKPK | GSEGGGS | GGLVQPGG | GGGSGG | PSSLSAS |
| | LDLQMILNG | S (SEQ | DTLMISRTPEVTCV | E (SEQ | SLRLSCAA | GGSGGG | VGDRVTI |
| | INNYKNPKL | ID NO: | VVDVSHEDPEVKFN | ID NO: | SGFTFSSY | GS | TCRASQS |
| | TRMLTFKFY | 30) | WYVDGVEVHNAKTK | 1546) | WMHWVRQA | (SEQ | ISSSLAW |
| | MPKKATELK | | PREEQYNSTYRVVS | | PGKGLEWV | ID NO: | YQQKPGK |
| | HLQCLEEEI | | VLTVLHQDWLNGKE | | SYISGSGG | 22) | APKLLIY |
| | KPLEEALNL | | YKCKVSNKALPAPI | | YTNYADSV | | AASSLQS |
| | APSKNFHLR | | EKTISKAKGQPREP | | KGRFTISR | | GVPSRFS |
| | PRDLISDIN | | QVYTLPPSREEMTK | | DNSKNTLY | | GSGSGTD |
| | VIVLELKGS | | NQVSLTCLVKGFYP | | LQMNSLRA | | FTLTISS |
| | ETTFMCEYA | | SDIAVEWESNGQPE | | EDTAVYYC | | LQPEDFA |
| | DETATIVEF | | NNYKTTPPVLDSDG | | ARDRPYYY | | TYYCQQY |
| | INRWITFSQ | | SFFLYSKLTVDKSR | | DIDVWGKG | | KSYPVTF |
| | SIISTLT | | WQQGNVFSCSVMHE | | TTVTVSS | | GQGTKVE |
| | (SEQ ID | | ALHNHYTQKSLSLS | | (SEQ ID | | IK (SEQ |
| | NO: 41) | | PG (SEQ ID NO: | | NO: | | ID NO: |
| | | | 21) | | 1477) | | 1367) |
| MIAB | APTSSSTKK | GGGGSGG | DKTHTCPPCPAPEA | GGGSEGG | EVQLLESG | GGGGSG | DIQMTQS |
| 220 | TQLQLEHLL | GGSGGGG | AGAPSVFLFPPKPK | GSEGGGS | GGLVQPGG | GGGSGG | PSSLSAS |
| | LDLQMILNG | S (SEQ | DTLMISRTPEVTCV | E (SEQ | SLRLSCAA | GGSGGG | VGDRVTI |
| | INNYKNPKL | ID NO: | VVDVSHEDPEVKFN | ID NO: | SGFTFSSY | GS | TCRASQS |
| | TRMLTFKFY | 30) | WYVDGVEVHNAKTK | 1546) | WMHWVRQA | (SEQ | ISSSLAW |
| | MPKKATELK | | PREEQYNSTYRVVS | | PGKGLEWV | ID NO: | YQQKPGK |
| | HLQCLEEEL | | VLTVLHQDWLNGKE | | SYISGSGG | 22) | APKLLIY |
| | KPLEEALNL | | YKCKVSNKALPAPI | | YTNYADSV | | AASSLQS |
| | APSKNFHLR | | EKTISKAKGQPREP | | KGRFTISR | | GVPSRFS |
| | PRDLISDIN | | QVYTLPPSREEMTK | | DNSKNTLY | | GSGSGTD |
| | VIVLELKGS | | NQVSLTCLVKGFYP | | LQMNSLRA | | FTLTISS |
| | ETTFMCEYA | | SDIAVEWESNGQPE | | EDTAVYYC | | LQPEDFA |
| | DETATIVEF | | NNYKTTPPVLDSDG | | ARDRPYYY | | TYYCQQY |
| | INRWITFSQ | | SFFLYSKLTVDKSR | | DLDVWGKG | | KSYPVTF |
| | SIISTLT | | WQQGNVFSCSVMHE | | TTVTVSS | | GQGTKVE |
| | (SEQ ID | | ALHNHYTQKSLSLS | | (SEQ ID | | IK (SEQ |
| | NO: 41) | | PG (SEQ ID NO: | | NO: | | ID NO: |
| | | | 21) | | 1480) | | 1367) |
| MIAB | APTSSSTKK | GGGGSGG | DKTHTCPPCPAPEA | GGGSEGG | EVQLLESG | GGGGSG | DIQMTQS |
| 221 | TQLQLEHLL | GGSGGGG | AGAPSVFLFPPKPK | GSEGGGS | GGLVQPGG | GGGSGG | PSSLSAS |
| | LDLQMILNG | S (SEQ | DTLMISRTPEVTCV | E (SEQ | SLRLSCAA | GGSGGG | VGDRVTI |
| | INNYKNPKL | ID NO: | VVDVSHEDPEVKFN | ID NO: | SGFTFSSY | GS | TCRASQS |
| | TRMLTFKFY | 30) | WYVDGVEVHNAKTK | 1546) | WMHWVRQA | (SEQ | ISSSLAW |
| | MPKKATELK | | PREEQYNSTYRVVS | | PGKCLEWV | ID NO: | YQQKPGK |
| | HLQCLEEEL | | VLTVLHQDWLNGKE | | SYISGSGG | 22) | APKLLIY |
| | KPLEEALNL | | YKCKVSNKALPAPI | | YTNYADSV | | AASSLQS |
| | APSKNFHLR | | EKTISKAKGQPREP | | KGRFTISR | | GVPSRFS |
| | PRDLISDIN | | QVYTLPPSREEMTK | | DNSKNTLY | | GSGSGTD |
| | VIVLELKGS | | NQVSLTCLVKGFYP | | LQMNSLRA | | FTLTISS |
| | ETTFMCEYA | | SDIAVEWESNGQPE | | EDTAVYYC | | LQPEDFA |
| | DETATIVEF | | NNYKTTPPVLDSDG | | ARDRPYYY | | TYYCQQY |
| | INRWITFSQ | | SFFLYSKLTVDKSR | | DMDVWGKG | | KSYPVTF |
| | SIISTLT | | WQQGNVFSCSVMHE | | TTVTVSS | | GCGTKVE |
| | (SEQ ID | | ALHNHYTQKSLSLS | | (SEQ ID | | IK (SEQ |
| | NO: 41) | | PG (SEQ ID NO: | | NO: | | ID NO: |
| | | | 21) | | 1542) | | 1543) |
| MIAB | APTSSSTKK | GGGGSGG | DKTHTCPPCPAPEA | GGGSEGG | EVQLLESG | GGGGSG | DIQMTQS |
| 222 | TQLQLEHLL | GGSGGGG | AGAPSVFLFPPKPK | GSEGGGS | GGLVQPGG | GGGSGG | PSSLSAS |
| | LDLQMILNG | S (SEQ | DTLMISRTPEVTCV | E (SEQ | SLRLSCAA | GGSGGG | VGDRVTI |
| | INNYKNPKL | ID NO: | VVDVSHEDPEVKFN | ID NO: | SGFTFSSY | GS | TCRASQS |
| | TRMLTFKFY | 30) | WYVDGVEVHNAKTK | 1546) | WMHWVRQA | (SEQ | ISSSLAW |
| | MPKKATELK | | PREEQYNSTYRVVS | | PGKCLEWV | ID NO: | YQQKPGK |
| | HLQCLEEEL | | VLTVLHQDWLNGKE | | SYISGSGG | 22) | APKLLIY |
| | KPLEEALNL | | YKCKVSNKALPAPI | | YTNYADSV | | AASSLQS |
| | APSKNFHLR | | EKTISKAKGQPREP | | KGRFTISR | | GVPSRFS |
| | PRDLISDIN | | QVYTLPPSREEMTK | | DNSKNTLY | | GSGSGTD |
| | VIVLELKGS | | NQVSLTCLVKGFYP | | LQMNSLRA | | FTLTISS |
| | ETTFMCEYA | | SDIAVEWESNGQPE | | EDTAVYYC | | LQPEDFA |
| | DETATIVEF | | NNYKTTPPVLDSDG | | ARDRPYYY | | TYYCQQY |
| | INRWITFSQ | | SFFLYSKLTVDKSR | | DIDVWGKG | | KSYPVTF |
| | SIISTLT | | WQQGNVFSCSVMHE | | TTVTVSS | | GCGTKVE |
| | (SEQ ID | | ALHNHYTQKSLSLS | | (SEQ ID | | IK (SEQ |
| | NO: 41) | | PG (SEQ ID NO: | | NO: | | ID NO: |
| | | | 21) | | 1544) | | 1543) |
| MIAB | APTSSSTKK | GGGGSGG | DKTHTCPPCPAPEA | GGGSEGG | EVQLLESG | GGGGSG | DIQMTQS |
| 223 | TQLQLEHLL | GGSGGGG | AGAPSVFLFPPKPK | GSEGGGS | GGLVQPGG | GGGSGG | PSSLSAS |
| | LDLQMILNG | S (SEQ | DTLMISRTPEVTCV | E (SEQ | SLRLSCAA | GGSGGG | VGDRVTI |
| | INNYKNPKL | ID NO: | VVDVSHEDPEVKFN | ID NO: | SGFTFSSY | GS | TCRASQS |
| | TRMLTFKFY | 30) | WYVDGVEVHNAKTK | 1546) | WMHWVRQA | (SEQ | ISSSLAW |
| | MPKKATELK | | PREEQYNSTYRVVS | | PGKCLEWV | ID NO: | YQQKPGK |
| | HLQCLEEEL | | VLTVLHQDWLNGKE | | SYISGSGG | 22) | APKLLIY |
| | KPLEEALNL | | YKCKVSNKALPAPI | | YTNYADSV | | AASSLQS |
| | APSKNFHLR | | EKTISKAKGQPREP | | KGRFTISR | | GVPSRFS |
| | PRDLISDIN | | QVYTLPPSREEMTK | | DNSKNTLY | | GSGSGTD |
| | VIVLELKGS | | NQVSLTCLVKGFYP | | LQMNSLRA | | FTLTISS |
| | ETTFMCEYA | | SDIAVEWESNGQPE | | EDTAVYYC | | LQPEDFA |
| | DETATIVEF | | NNYKTTPPVLDSDG | | ARDRPYYY | | TYYCQQY |
| | INRWITFSQ | | SFFLYSKLTVDKSR | | DLDVWGKG | | KSYPVTF |
| | SIISTLT | | WQQGNVFSCSVMHE | | TTVTVSS | | GCGTKVE |
| | (SEQ ID | | ALHNHYTQKSLSLS | | (SEQ ID | | IK (SEQ |
| | NO: 41) | | PG (SEQ ID NO: | | NO: | | ID NO: |
| | | | 21) | | 1545) | | 1543) |
| MIAB | APTSSSTKK | GGGGSGG | DKTHTCPPCPAPEA | GGGGSGG | EVQLLESG | GGGGSG | DIQMTQS |
| 224 | TQLQLEHLL | GGSGGGG | AGAPSVFLFPPKPK | GGSGGGG | GGLVQPGG | GGGSGG | PSSLSAS |
| | LDLQMILNG | SGGGGS | DTLMISRTPEVTCV | S (SEQ | SLRLSCAA | GGSGGG | VGDRVTI |
| | INNYKNPKL | (SEQ ID | VVDVSHEDPEVKFN | ID NO: | SGFTFSSY | GS | TCRASQS |
| | TRMLTFKFY | NO: 22) | WYVDGVEVHNAKTK | 30) | WMHWVRQA | (SEQ | ISSSLAW |
| | MPKKATELK | | PREEQYNSTYRVVS | | PGKGLEWV | ID NO: | YQQKPGK |
| | HLQCLEEEL | | VLTVLHQDWLNGKE | | SYISGSGG | 22) | APKLLIY |
| | KPLEEALNL | | YKCKVSNKALPAPI | | YTNYADSV | | AASSLQS |
| | APSKNFHLR | | EKTISKAKGQPREP | | KGRFTISR | | GVPSRFS |
| | PRDLISDIN | | QVYTLPPSREEMTK | | DNSKNTLY | | GSGSGTD |
| | VIVLELKGS | | NQVSLTCLVKGFYP | | LQMNSLRA | | FTLTISS |
| | ETTFMCEYA | | SDIAVEWESNGQPE | | EDTAVYYC | | LQPEDFA |
| | DETATIVEF | | NNYKTTPPVLDSDG | | ARDRPYYY | | TYYCQQY |
| | INRWITFSQ | | SFFLYSKLTVDKSR | | DMDVWGKG | | KSYPVTF |
| | SIISTLT | | WQQGNVFSCSVMHE | | TTVTVSS | | GQGTKVE |
| | (SEQ ID | | ALHNHYTQKSLSLS | | (SEQ ID | | IK (SEQ |
| | NO: 41) | | PG (SEQ ID NO: | | NO: | | ID NO: |
| | | | 21) | | 1445) | | 1367) |
| MIAB | APTSSSTKK | GGGGSGG | DKTHTCPPCPAPEA | GGGGSGG | EVQLLESG | GGGGSG | DIQMTQS |
| 225 | TQLQLEHLL | GGSGGGG | AGAPSVFLFPPKPK | GGSGGGG | GGLVQPGG | GGGSGG | PSSLSAS |
| | LDLQMILNG | SGGGGS | DTLMISRTPEVTCV | S (SEQ | SLRLSCAA | GGSGGG | VGDRVTI |
| | INNYKNPKL | (SEQ ID | VVDVSHEDPEVKFN | ID NO: | SGFTFSSY | GS | TCRASQS |
| | TRMLTFKFY | NO: 22) | WYVDGVEVHNAKTK | 30) | WMHWVRQA | (SEQ | ISSSLAW |
| | MPKKATELK | | PREEQYNSTYRVVS | | PGKGLEWV | ID NO: | YQQKPGK |
| | HLQCLEEEL | | VLTVLHQDWLNGKE | | SYISGSGG | 22) | APKLLIY |
| | KPLEEALNL | | YKCKVSNKALPAPI | | YTNYADSV | | AASSLQS |
| | APSKNFHLR | | EKTISKAKGQPREP | | KGRFTISR | | GVPSRFS |
| | PRDLISDIN | | QVYTLPPSREEMTK | | DNSKNTLY | | GSGSGTD |
| | VIVLELKGS | | NQVSLTCLVKGFYP | | LQMNSLRA | | FTLTISS |
| | ETTFMCEYA | | SDIAVEWESNGQPE | | EDTAVYYC | | LQPEDFA |
| | DETATIVEF | | NNYKTTPPVLDSDG | | ARDRPYYY | | TYYCQQY |
| | INRWITFSQ | | SFFLYSKLTVDKSR | | DIDVWGKG | | KSYPVTF |
| | SIISTLT | | WQQGNVFSCSVMHE | | TTVTVSS | | GQGTKVE |
| | (SEQ ID | | ALHNHYTQKSLSLS | | (SEQ ID | | IK (SEQ |
| | NO: 41) | | PG (SEQ ID NO: | | NO: | | ID NO: |
| | | | 21) | | 1477) | | 1367) |
| MIAB | APTSSSTKK | GGGGSGG | DKTHTCPPCPAPEA | GGGGSGG | EVQLLESG | GGGGSG | DIQMTQS |
| 226 | TQLQLEHLL | GGSGGGG | AGAPSVFLFPPKPK | GGSGGGG | GGLVQPGG | GGGSGG | PSSLSAS |
| | LDLQMILNG | SGGGGS | DTLMISRTPEVTCV | S (SEQ | SLRLSCAA | GGSGGG | VGDRVTI |
| | INNYKNPKL | (SEQ ID | VVDVSHEDPEVKFN | ID NO: | SGFTFSSY | GS | TCRASQS |
| | TRMLTFKFY | NO: 22) | WYVDGVEVHNAKTK | 30) | WMHWVRQA | (SEQ | ISSSLAW |
| | MPKKATELK | | PREEQYNSTYRVVS | | PGKGLEWV | ID NO: | YQQKPGK |
| | HLQCLEEEL | | VLTVLHQDWLNGKE | | SYISGSGG | 22) | APKLLIY |
| | KPLEEALNL | | YKCKVSNKALPAPI | | YTNYADSV | | AASSLQS |
| | APSKNFHLR | | EKTISKAKGQPREP | | KGRFTISR | | GVPSRFS |
| | PRDLISDIN | | QVYTLPPSREEMTK | | DNSKNTLY | | GSGSGTD |
| | VIVLELKGS | | NQVSLTCLVKGFYP | | LQMNSLRA | | FTLTISS |
| | ETTFMCEYA | | SDIAVEWESNGQPE | | EDTAVYYC | | LQPEDFA |
| | DETATIVEF | | NNYKTTPPVLDSDG | | ARDRPYYY | | TYYCQQY |
| | INRWITFSQ | | SFFLYSKLTVDKSR | | DLDVWGKG | | KSYPVTF |
| | SIISTLT | | WQQGNVFSCSVMHE | | TTVTVSS | | GQGTKVE |
| | (SEQ ID | | ALHNHYTQKSLSLS | | (SEQ ID | | IK (SEQ |
| | NO: 41) | | PG (SEQ ID NO: | | NO: | | ID NO: |
| | | | 21) | | 1480) | | 1367) |
| MIAB | APTSSSTKK | GGGGSGG | DKTHTCPPCPAPEA | GGGGSGG | EVQLLESG | GGGGSG | DIQMTQS |
| 227 | TQLQLEHLI | GGSGGGG | AGAPSVFLFPPKPK | GGSGGGG | GGLVQPGG | GGGSGG | PSSLSAS |
| | LDLQMILNG | SGGGGS | DTLMISRTPEVTCV | S (SEQ | SLRLSCAA | GGSGGG | VGDRVTI |
| | INNYKNPKL | (SEQ ID | VVDVSHEDPEVKFN | ID NO: | SGFTFSSY | GS | TCRASQS |
| | TRMLTFKFY | NO: 22) | WYVDGVEVHNAKTK | 30) | WMHWVRQA | (SEQ | ISSSLAW |
| | MPKKATELK | | PREEQYNSTYRVVS | | PGKCLEWV | ID NO: | YQQKPGK |
| | HLQCLEEEL | | VLTVLHQDWLNGKE | | SYISGSGG | 22) | APKLLIY |
| | KPLEEALNL | | YKCKVSNKALPAPI | | YTNYADSV | | AASSLQS |
| | APSKNFHLR | | EKTISKAKGQPREP | | KGRFTISR | | GVPSRFS |
| | PRDLISDIN | | QVYTLPPSREEMTK | | DNSKNTLY | | GSGSGTD |
| | VIVLELKGS | | NQVSLTCLVKGFYP | | LQMNSLRA | | FTLTISS |
| | ETTFMCEYA | | SDIAVEWESNGQPE | | EDTAVYYC | | LQPEDFA |
| | DETATIVEF | | NNYKTTPPVLDSDG | | ARDRPYYY | | TYYCQQY |
| | INRWITFSQ | | SFFLYSKLTVDKSR | | DMDVWGKG | | KSYPVTF |
| | SIISTLT | | WQQGNVFSCSVMHE | | TTVTVSS | | GCGTKVE |
| | (SEQ ID | | ALHNHYTQKSLSLS | | (SEQ ID | | IK (SEQ |
| | NO: 41) | | PG (SEQ ID NO: | | NO: | | ID NO: |
| | | | 21) | | 1542) | | 1543) |
| MIAB | APTSSSTKK | GGGGSGG | DKTHTCPPCPAPEA | GGGGSGG | EVQLLESG | GGGGSG | DIQMTQS |
| 228 | TQLQLEHLL | GGSGGGG | AGAPSVFLFPPKPK | GGSGGGG | GGLVQPGG | GGGSGG | PSSLSAS |
| | LDLQMILNG | SGGGGS | DTLMISRTPEVTCV | (SEQ | SLRLSCAA | GGSGGG | VGDRVTI |
| | INNYKNPKL | (SEQ ID | VVDVSHEDPEVKFN | ID NO: | SGFTFSSY | GS | TCRASQS |
| | TRMLTFKFY | NO: 22) | WYVDGVEVHNAKTK | 30) | WMHWVRQA | (SEQ | ISSSLAW |
| | MPKKATELK | | PREEQYNSTYRVVS | | PGKCLEWV | ID NO: | YQQKPGK |
| | HLQCLEEEL | | VLTVLHQDWLNGKE | | SYISGSGG | 22) | APKLLIY |
| | KPLEEALNL | | YKCKVSNKALPAPI | | YTNYADSV | | AASSLQS |
| | APSKNFHLR | | EKTISKAKGQPREP | | KGRFTISR | | GVPSRFS |
| | PRDLISDIN | | QVYTLPPSREEMTK | | DNSKNTLY | | GSGSGTD |
| | VIVLELKGS | | NQVSLTCLVKGFYP | | LQMNSLRA | | FTLTISS |
| | ETTFMCEYA | | SDIAVEWESNGQPE | | EDTAVYYC | | LQPEDFA |
| | DETATIVEF | | NNYKTTPPVLDSDG | | ARDRPYYY | | TYYCQQY |
| | INRWITFSQ | | SFFLYSKLTVDKSR | | DIDVWGKG | | KSYPVTF |
| | SIISTLT | | WQQGNVFSCSVMHE | | TTVTVSS | | GCGTKVE |
| | (SEQ ID | | ALHNHYTQKSLSLS | | (SEQ ID | | IK (SEQ |
| | NO: 41) | | PG (SEQ ID NO: | | NO: | | ID NO: |
| | | | 21) | | 1544) | | 1543) |
| MIAB | APTSSSTKK | GGGGSGG | DKTHTCPPCPAPEA | GGGGSGG | EVQLLESG | GGGGSG | DIQMTQS |
| 229 | TQLQLEHLI | GGSGGGG | AGAPSVFLFPPKPK | GGSGGGG | GGLVQPGG | GGGSGG | PSSLSAS |
| | LDLQMILNG | SGGGGS | DTLMISRTPEVTCV | S (SEQ | SLRLSCAA | GGSGGG | VGDRVTI |
| | INNYKNPKL | (SEQ ID | VVDVSHEDPEVKFN | ID NO: | SGFTFSSY | GS | TCRASQS |
| | TRMLTFKFY | NO: 22) | WYVDGVEVHNAKTK | 30) | WMHWVRQA | (SEQ | ISSSLAW |
| | MPKKATELK | | PREEQYNSTYRVVS | | PGKCLEWV | ID NO: | YQQKPGK |
| | HLQCLEEEL | | VLTVLHQDWLNGKE | | SYISGSGG | 22) | APKLLIY |
| | KPLEEALNL | | YKCKVSNKALPAPI | | YTNYADSV | | AASSLQS |
| | APSKNFHLR | | EKTISKAKGQPREP | | KGRFTISR | | GVPSRFS |
| | PRDLISDIN | | QVYTLPPSREEMTK | | DNSKNTLY | | GSGSGTD |
| | VIVLELKGS | | NQVSLTCLVKGFYP | | LQMNSLRA | | FTLTISS |
| | ETTFMCEYA | | SDIAVEWESNGQPE | | EDTAVYYC | | LQPEDFA |
| | DETATIVEF | | NNYKTTPPVLDSDG | | ARDRPYYY | | TYYCQQY |
| | INRWITFSQ | | SFFLYSKLTVDKSR | | DLDVWGKG | | KSYPVTF |
| | SIISTLT | | WQQGNVFSCSVMHE | | TTVTVSS | | GCGTKVE |
| | (SEQ ID | | ALHNHYTQKSLSLS | | (SEQ ID | | IK (SEQ |
| | NO: 41) | | PG (SEQ ID NO: | | NO: | | ID NO: |
| | | | 21) | | 1545) | | 1543) |
| MIAB | APTSSSTKK | GGGGSGG | DKTHTCPPCPAPEA | GGGSEGG | EVQLLESG | GGGGSG | DIQMTQS |
| 230 | TQLQLEHLL | GGSGGGG | AGAPSVFLFPPKPK | GSEGGGS | GGLVQPGG | GGGSGG | PSSLSAS |
| | LDLQMILNG | SGGGGS | DTLMISRTPEVTCV | E (SEQ | SLRLSCAA | GGSGGG | VGDRVTI |
| | INNYKNPKL | (SEQ ID | VVDVSHEDPEVKFN | ID NO: | SGFTFSSY | GS | TCRASQS |
| | TRMLTFKFY | NO: 22) | WYVDGVEVHNAKTK | 1546) | WMHWVRQA | (SEQ | ISSSLAW |
| | MPKKATELK | | PREEQYNSTYRVVS | | PGKGLEWV | ID NO: | YQQKPGK |
| | HLQCLEEEL | | VLTVLHQDWLNGKE | | SYISGSGG | 22) | APKLLIY |
| | KPLEEALNL | | YKCKVSNKALPAPI | | YTNYADSV | | AASSLQS |
| | APSKNFHLR | | EKTISKAKGQPREP | | KGRFTISR | | GVPSRFS |
| | PRDLISDIN | | QVYTLPPSREEMTK | | DNSKNTLY | | GSGSGTD |
| | VIVLELKGS | | NQVSLTCLVKGFYP | | LQMNSLRA | | FTLTISS |
| | ETTFMCEYA | | SDIAVEWESNGQPE | | EDTAVYYC | | LQPEDFA |
| | DETATIVEF | | NNYKTTPPVLDSDG | | ARDRPYYY | | TYYCQQY |
| | INRWITFSQ | | SFFLYSKLTVDKSR | | DMDVWGKG | | KSYPVTF |
| | SIISTLT | | WQQGNVFSCSVMHE | | TTVTVSS | | GQGTKVE |
| | (SEQ ID | | ALHNHYTQKSLSLS | | (SEQ ID | | IK (SEQ |
| | NO: 41) | | PG (SEQ ID NO: | | NO: | | ID NO: |
| | | | 21) | | 1445) | | 1367) |
| MIAB | APTSSSTKK | GGGGSGG | DKTHTCPPCPAPEA | GGGSEGG | EVQLLESG | GGGGSG | DIQMTQS |
| 231 | TQLQLEHLL | GGSGGGG | AGAPSVFLFPPKPK | GSEGGGS | GGLVQPGG | GGGSGG | PSSLSAS |
| | LDLQMILNG | SGGGGS | DTLMISRTPEVTCV | E (SEQ | SLRLSCAA | GGSGGG | VGDRVTI |
| | INNYKNPKL | (SEQ ID | VVDVSHEDPEVKFN | ID NO: | SGFTFSSY | GS | TCRASQS |
| | TRMLTFKFY | NO: 22) | WYVDGVEVHNAKTK | 1546) | WMHWVRQA | (SEQ | ISSSLAW |
| | MPKKATELK | | PREEQYNSTYRVVS | | PGKGLEWV | ID NO: | YQQKPGK |
| | HLQCLEEEL | | VLTVLHQDWLNGKE | | SYISGSGG | 22) | APKLLIY |
| | KPLEEALNL | | YKCKVSNKALPAPI | | YTNYADSV | | AASSLQS |
| | APSKNFHLR | | EKTISKAKGQPREP | | KGRFTISR | | GVPSRFS |
| | PRDLISDIN | | QVYTLPPSREEMTK | | DNSKNTLY | | GSGSGTD |
| | VIVLELKGS | | NQVSLTCLVKGFYP | | LQMNSLRA | | FTLTISS |
| | ETTFMCEYA | | SDIAVEWESNGQPE | | EDTAVYYC | | LQPEDFA |
| | DETATIVEF | | NNYKTTPPVLDSDG | | ARDRPYYY | | TYYCQQY |
| | INRWITFSQ | | SFFLYSKLTVDKSR | | DIDVWGKG | | KSYPVTF |
| | SIISTLT | | WQQGNVFSCSVMHE | | TTVTVSS | | GQGTKVE |
| | (SEQ ID | | ALHNHYTQKSLSLS | | (SEQ ID | | IK (SEQ |
| | NO: 41) | | PG (SEQ ID NO: | | NO: | | ID NO: |
| | | | 21) | | 1477) | | 1367) |
| MIAB | APTSSSTKK | GGGGSGG | DKTHTCPPCPAPEA | GGGSEGG | EVQLLESG | GGGGSG | DIQMTQS |
| 232 | TQLQLEHLL | GGSGGGG | AGAPSVFLFPPKPK | GSEGGGS | GGLVQPGG | GGGSGG | PSSLSAS |
| | LDLQMILNG | SGGGGS | DTLMISRTPEVTCV | E (SEQ | SLRLSCAA | GGSGGG | VGDRVTI |
| | INNYKNPKL | (SEQ ID | VVDVSHEDPEVKFN | ID NO: | SGFTFSSY | GS | TCRASQS |
| | TRMLTFKFY | NO: 22) | WYVDGVEVHNAKTK | 1546) | WMHWVRQA | (SEQ | ISSSLAW |
| | MPKKATELK | | PREEQYNSTYRVVS | | PGKGLEWV | ID NO: | YQQKPGK |
| | HLQCLEEEL | | VLTVLHQDWLNGKE | | SYISGSGG | 22) | APKLLIY |
| | KPLEEALNL | | YKCKVSNKALPAPI | | YTNYADSV | | AASSLQS |
| | APSKNFHLR | | EKTISKAKGQPREP | | KGRFTISR | | GVPSRFS |
| | PRDLISDIN | | QVYTLPPSREEMTK | | DNSKNTLY | | GSGSGTD |
| | VIVLELKGS | | NQVSLTCLVKGFYP | | LQMNSLRA | | FTLTISS |
| | ETTFMCEYA | | SDIAVEWESNGQPE | | EDTAVYYC | | LQPEDFA |
| | DETATIVEF | | NNYKTTPPVLDSDG | | ARDRPYYY | | TYYCQQY |
| | INRWITFSQ | | SFFLYSKLTVDKSR | | DLDVWGKG | | KSYPVTF |
| | SIISTLT | | WQQGNVFSCSVMHE | | TTVTVSS | | GQGTKVE |
| | (SEQ ID | | ALHNHYTQKSLSLS | | (SEQ ID | | IK (SEQ |
| | NO: 41) | | PG (SEQ ID NO: | | NO: | | ID NO: |
| | | | 21) | | 1480) | | 1367) |
| MIAB | APTSSSTKK | GGGGSGG | DKTHTCPPCPAPEA | GGGSEGG | EVQLLESG | GGGGSG | DIQMTQS |
| 233 | TQLQLEHLL | GGSGGGG | AGAPSVFLFPPKPK | GSEGGGS | GGLVQPGG | GGGSGG | PSSLSAS |
| | LDLQMILNG | SGGGGS | DTLMISRTPEVTCV | E (SEQ | SLRLSCAA | GGSGGG | VGDRVTI |
| | INNYKNPKL | (SEQ ID | VVDVSHEDPEVKFN | ID NO: | SGFTFSSY | GS | TCRASQS |
| | TRMLTFKFY | NO: 22) | WYVDGVEVHNAKTK | 1546) | WMHWVRQA | (SEQ | ISSSLAW |
| | MPKKATELK | | PREEQYNSTYRVVS | | PGKCLEWV | ID NO: | YQQKPGK |
| | HLQCLEEEL | | VLTVLHQDWLNGKE | | SYISGSGG | 22) | APKLLIY |
| | KPLEEALNL | | YKCKVSNKALPAPI | | YTNYADSV | | AASSLQS |
| | APSKNFHLR | | EKTISKAKGQPREP | | KGRFTISR | | GVPSRFS |
| | PRDLISDIN | | QVYTLPPSREEMTK | | DNSKNTLY | | GSGSGTD |
| | VIVLELKGS | | NQVSLTCLVKGFYP | | LQMNSLRA | | FTLTISS |
| | ETTFMCEYA | | SDIAVEWESNGQPE | | EDTAVYYC | | LQPEDFA |
| | DETATIVEF | | NNYKTTPPVLDSDG | | ARDRPYYY | | TYYCQQY |
| | INRWITFSQ | | SFFLYSKLTVDKSR | | DMDVWGKG | | KSYPVTF |
| | SIISTLT | | WQQGNVFSCSVMHE | | TTVTVSS | | GCGTKVE |
| | (SEQ ID | | ALHNHYTQKSLSLS | | (SEQ ID | | IK (SEQ |
| | NO: 41) | | PG (SEQ ID NO: | | NO: | | ID NO: |
| | | | 21) | | 1542) | | 1543) |
| MIAB | APTSSSTKK | GGGGSGG | DKTHTCPPCPAPEA | GGGSEGG | EVQLLESG | GGGGSG | DIQMTQS |
| 234 | TQLQLEHLL | GGSGGGG | AGAPSVFLFPPKPK | GSEGGGS | GGLVQPGG | GGGSGG | PSSLSAS |
| | LDLQMILNG | SGGGGS | DTLMISRTPEVTCV | E (SEQ | SLRLSCAA | GGSGGG | VGDRVTI |
| | INNYKNPKL | (SEQ ID | VVDVSHEDPEVKFN | ID NO: | SGFTFSSY | GS | TCRASQS |
| | TRMLTFKFY | NO: 22) | WYVDGVEVHNAKTK | 1546) | WMHWVRQA | (SEQ | ISSSLAW |
| | MPKKATELK | | PREEQYNSTYRVVS | | PGKCLEWV | ID NO: | YQQKPGK |
| | HLQCLEEEL | | VLTVLHQDWLNGKE | | SYISGSGG | 22) | APKLLIY |
| | KPLEEALNL | | YKCKVSNKALPAPI | | YTNYADSV | | AASSLQS |
| | APSKNFHLR | | EKTISKAKGQPREP | | KGRFTISR | | GVPSRFS |
| | PRDLISDIN | | QVYTLPPSREEMTK | | DNSKNTLY | | GSGSGTD |
| | VIVLELKGS | | NQVSLTCLVKGFYP | | LQMNSLRA | | FTLTISS |
| | ETTFMCEYA | | SDIAVEWESNGQPE | | EDTAVYYC | | LQPEDFA |
| | DETATIVEF | | NNYKTTPPVLDSDG | | ARDRPYYY | | TYYCQQY |
| | INRWITFSQ | | SFFLYSKLTVDKSR | | DIDVWGKG | | KSYPVTF |
| | SIISTLT | | WQQGNVFSCSVMHE | | TTVTVSS | | GCGTKVE |
| | (SEQ ID | | ALHNHYTQKSLSLS | | (SEQ ID | | IK (SEQ |
| | NO: 41) | | PG (SEQ ID NO: | | NO: | | ID NO: |
| | | | 21) | | 1544) | | 1543) |
| MIAB | APTSSSTKK | GGGGSGG | DKTHTCPPCPAPEA | GGGSEGG | EVQLLESG | GGGGSG | DIQMTQS |
| 235 | TQLQLEHLL | GGSGGGG | AGAPSVFLFPPKPK | GSEGGGS | GGLVQPGG | GGGSGG | PSSLSAS |
| | LDLQMILNG | SGGGGS | DTLMISRTPEVTCV | E (SEQ | SLRLSCAA | GGSGGG | VGDRVTI |
| | INNYKNPKL | (SEQ ID | VVDVSHEDPEVKFN | ID NO: | SGFTFSSY | GS | TCRASQS |
| | TRMLTFKFY | NO: 22) | WYVDGVEVHNAKTK | 1546) | WMHWVRQA | (SEQ | ISSSLAW |
| | MPKKATELK | | PREEQYNSTYRVVS | | PGKCLEWV | ID NO: | YQQKPGK |
| | HLQCLEEEL | | VLTVLHQDWLNGKE | | SYISGSGG | 22) | APKLLIY |
| | KPLEEALNL | | YKCKVSNKALPAPI | | YTNYADSV | | AASSLQS |
| | APSKNFHLR | | EKTISKAKGQPREP | | KGRFTISR | | GVPSRFS |
| | PRDLISDIN | | QVYTLPPSREEMTK | | DNSKNTLY | | GSGSGTD |
| | VIVLELKGS | | NQVSLTCLVKGFYP | | LQMNSLRA | | FTLTISS |
| | ETTFMCEYA | | SDIAVEWESNGQPE | | EDTAVYYC | | LQPEDFA |
| | DETATIVEF | | NNYKTTPPVLDSDG | | ARDRPYYY | | TYYCQQY |
| | INRWITFSQ | | SFFLYSKLTVDKSR | | DLDVWGKG | | KSYPVTF |
| | SIISTLT | | WQQGNVFSCSVMHE | | TTVTVSS | | GCGTKVE |
| | (SEQ ID | | ALHNHYTQKSLSLS | | (SEQ ID | | IK (SEQ |
| | NO: 41) | | PG (SEQ ID NO: | | NO: | | ID NO: |
| | | | 21) | | 1545) | | 1543) |

[0373] In some embodiments, the MAdCAM antibody comprises one or more sequences, or a combination thereof, of the sequences presented in Table 11.

[0374] In some embodiments, the polypeptide is referred to as an antibody or antigen binding protein.

[0375] In some embodiments, as provided for herein, the MAdCAM antibody, or binding fragment thereof, is linked directly or indirectly to a PD-1 antibody or binding fragment thereof.

[0376] In some embodiments, as provided for herein, the MAdCAM antibody, or binding fragment thereof, is linked directly or indirectly to an IL-2 mutein or binding fragment thereof. The IL-2 mutein can be any mutein as provided for herein or other IL-2 muteins known to one of skill in the art.

[0377] In some embodiments, if the therapeutic compound comprises a Fc portion, the Fc domain, (portion) bears mutations to render the Fc region “effectorless,” that is unable to bind FcRs. The mutations that render Fc regions effectorless are known. In some embodiments, the mutations in the Fc region, which is according to the known numbering system, are selected from the group consisting of: K322A, L234A, L235A, G237A, L234F, L235E, N297, P331S, or any combination thereof. In some embodiments, the Fc mutations comprises a mutation at L234 and/or L235 and/or G237. In some embodiments, the Fc mutations comprise L234A and/or L235A mutations, which can be referred to as LALA mutations. In some embodiments, the Fc mutations comprise L234A, L235A, and G237A mutations.

[0378] Disclosed herein are Linker Region polypeptides, therapeutic peptides, and nucleic acids encoding the polypeptides (e.g. therapeutic compounds), vectors comprising the nucleic acid sequences, and cells comprising the nucleic acids or vectors

[0379] Therapeutic compounds can comprise a plurality of specific targeting moieties. In some embodiments, the therapeutic compound comprises a plurality one specific targeting moiety, a plurality of copies of a donor specific targeting moiety or a plurality of tissue specific targeting moieties. In some embodiments, a therapeutic compound comprises a first and a second donor specific targeting moiety, e.g., a first donor specific targeting moiety specific for a first donor target and a second donor specific targeting moiety specific for a second donor target, e.g., wherein the first and second target are found on the same donor tissue. In some embodiments, the therapeutic compound comprises e.g., a first specific targeting moiety for a tissue specific target and a second specific targeting moiety for a second target, e.g., wherein the first and second target are found on the same or different target tissue.

[0380] In some embodiments, a therapeutic compound comprises a plurality of effector binding/modulating moieties each comprising an ICIM binding/modulating moiety, the number of ICIM binding/modulating moieties is sufficiently low that clustering of the ICIM binding/modulating moiety's ligand on immune cells (in the absence of target binding) is minimized, e.g., to avoid systemic agonizing of immune cells in the absence of binding of the therapeutic compound to target.

[0381] In some embodiments, the therapeutic compound has the formula from N-terminus to C-terminus:
[0382] A1-Linker A-A2-Linker B-A3
[0383] A3-Linker A-A2-Linker B-A1,
   wherein,
[0384] A1 and A3, each independently comprises an effector binding/modulating moiety, e.g., an ICIM binding/modulating moiety, an IIC binding/modulating moiety, ICSM binding/modulating moiety, or an SM binding/modulating moiety; or a specific targeting moiety,
[0385] A2 comprises an Fc region or is absent; and
[0386] Linker A and Linker B, each are independent linkers.

[0387] In some embodiments,
[0388] A1 comprises an IL-2 mutein molecule,
[0389] A3 comprises a specific targeting moiety, e.g. anti-human MAdCAM Ab, such as a scFv,
[0390] A2 comprises an Fc region, and
[0391] Linker A and Linker B, each are independent linkers further comprising glycine/serine linkers.

[0392] In some embodiments, a polypeptide is provided, wherein the polypeptide comprises a peptide of the formula

[0393] Ab-ConstantDomain-LinkerA-IL2Mutein-LinkerB-FcRegion, wherein the Ab is a variable heavy chain domain that binds to MAdCAM, the Constant domain is an Ig constant domain such as IgG1, IgG2, IgG3, or IgG4, Linker A is a linker, such as those provided herein, and the IL2Mutein is an IL-2 mutein, such as those provided for herein. In some embodiments, the variable heavy domain is a variable heavy chain domain as illustrated in Table 7. In some embodiments, the variable heavy chain domain comprises the variable heavy chain domain of Clone ID: 6, 75, or 79 of Table 7; MIAB197 of Table 9, or MIAB204 of Table 11. In some embodiments, the variable heavy chain domain comprises the CDRs of the heavy domain of 6, 75, or 79 of Table 7; or MIAB197 of Table 9. In some embodiments, the VH comprises a sequence of SEQ ID NO: 414, SEQ ID NO: 591, SEQ ID NO: 599, and SEQ ID NO: 1387.

[0394] In some embodiments, the ConstantDomain comprises a IgG1 constant domain, such as those provided for herein. In some embodiments, the constant domain comprises mutations to render the constant region “effectorless,” that is unable to bind FcRs. The mutations that render constant regions effectorless are known. In some embodiments, the mutations in the constant region, which is according to the known numbering system, are selected from the group consisting of: K322A, L234A, L235A, G237A, L234F, L235E, N297, P331S, or any combination thereof. In some embodiments, the constant region mutations comprises a mutation at L234 and/or L235 and/or G237. In some embodiments, the constant region mutations comprise L234A and/or L235A mutations, which can be referred to as LALA mutations. In some embodiments, the constant region mutations comprise L234A, L235A, and G237A mutations. In some embodiments, the ConstantDomain comprises SEQ ID NO: 44.

[0395] In some embodiments, the MAdCAM antibody is selected from the following table:

TABLE 15

| | ScFv | ScFv | | | | | | |
|---|---|---|---|---|---|---|---|---|
| Clone | VH | VK | | | | | | |
| (scFv) | Seq | Seq | HCDR1 | HCDR2 | HCDR3 | LCDR1 | LCDR2 | LCDR3 |
| MIAB212 | EVQLL | DIQMT | FTFSS | SYISG | CARDR | RASQS | SSLQS | QQYKS |
| | ESGGG | QSPS | YWMH | SGGYT | PYYYD | ISSSL | (SEQ | YPVT |
| | LVQPG | SLSAS | (SEQ | NYA | MDVW | A | ID | (SEQ |
| | GSLRL | VGDR | ID | (SEQ | (SEQ | (SEQ | NO: | ID |
| | SCAAS | VTITC | NO: | ID | ID | ID | 1497) | NO: |
| | GFTFS | RASQ | 1499) | NO: | NO: | NO: | | 1498) |
| | SYWMH | SISSS | | 1506) | 1507) | 1502) | | |
| | WVRQA | LAWY | | | | | | |
| | PGKGL | QQKPG | | | | | | |
| | EWVSY | KAPK | | | | | | |
| | ISGSG | LLIYA | | | | | | |
| | GYTNY | ASSL | | | | | | |
| | ADSVK | QSGVP | | | | | | |
| | GRFTI | SRFS | | | | | | |
| | SRDNS | GSGSG | | | | | | |
| | KNTLY | TDFT | | | | | | |
| | LQMNS | LTISS | | | | | | |
| | LRAED | LQPE | | | | | | |
| | TAVYY | DFATY | | | | | | |
| | CARDR | YCQQ | | | | | | |
| | PYYYD | YKSYP | | | | | | |
| | MDVWG | VTFG | | | | | | |
| | KGTTV | QGTKV | | | | | | |
| | TVSS | EIK | | | | | | |
| | (SEQ | (SEQ | | | | | | |
| | ID | ID | | | | | | |
| | NO: | NO: | | | | | | |
| | 1445) | 1367) | | | | | | |
| MIAB213 | EVQLL | DIQMT | FTFSS | SYISG | CARDR | RASQS | SSLQS | QQYKS |
| | ESGGG | QSPS | YWMH | SGGYT | PYYYD | ISSSL | (SEQ | YPVT |
| | LVQPG | SLSAS | (SEQ | NYA | IDVW | A | ID | (SEQ |
| | GSLRL | VGDR | ID | (SEQ | (SEQ | (SEQ | NO: | ID |
| | SCAAS | VTITC | NO: | ID | ID | ID | 1497) | NO: |
| | GFTFS | RASQ | 1499) | NO: | NO: | NO: | | 1498) |
| | SYWMH | SISSS | | 1506) | 1531) | 1502) | | |
| | WVRQA | LAWY | | | | | | |
| | PGKGL | QQKPG | | | | | | |
| | EWVSY | KAPK | | | | | | |
| | ISGSG | LLIYA | | | | | | |
| | GYTNY | ASSL | | | | | | |
| | ADSVK | QSGVP | | | | | | |
| | GRFTI | SRFS | | | | | | |
| | SRDNS | GSGSG | | | | | | |
| | KNTLY | TDFT | | | | | | |
| | LQMNS | LTISS | | | | | | |
| | LRAED | LQPE | | | | | | |
| | TAVYYC | DFATY | | | | | | |
| | ARDR | YCQQ | | | | | | |
| | PYYYDI | YKSYP | | | | | | |
| | DVWG | VTFG | | | | | | |
| | KGTTVT | QGTKV | | | | | | |
| | VSS | EIK | | | | | | |
| | (SEQ | (SEQ | | | | | | |
| | ID | ID | | | | | | |
| | NO: | NO: | | | | | | |
| | 1477) | 1367) | | | | | | |
| MIAB214 | EVQLL | DIQMT | FTFSS | SYISG | CARDR | RASQS | SSLQS | QQYKS |
| | ESGGG | QSPS | YWMH | SGGYT | PYYYD | ISSSL | (SEQ | YPVT |
| | LVQPG | SLSAS | (SEQ | NYA | LDVW | A | ID | (SEQ |
| | GSLRL | VGDR | ID | (SEQ | (SEQ | (SEQ | NO: | ID |
| | SCAAS | VTITC | NO: | ID | ID | ID | 1497) | NO: |
| | GFTFS | RASQ | 1499) | NO: | NO: | NO: | | 1498) |
| | SYWMH | SISSS | | 1506) | 1532) | 1502) | | |
| | WVRQA | LAWY | | | | | | |
| | PGKGL | QQKPG | | | | | | |
| | EWVSY | KAPK | | | | | | |
| | ISGSG | LLIYA | | | | | | |
| | GYTNY | ASSL | | | | | | |
| | ADSVK | QSGVP | | | | | | |
| | GRFTI | SRFS | | | | | | |
| | SRDNS | GSGSG | | | | | | |
| | KNTLY | TDFT | | | | | | |
| | LQMNS | LTISS | | | | | | |
| | LRAED | LQPE | | | | | | |
| | TAVYY | DFATY | | | | | | |
| | CARDR | YCQQ | | | | | | |
| | PYYYD | YKSYP | | | | | | |
| | LDVWG | VTFG | | | | | | |
| | KGTTV | QGTKV | | | | | | |
| | TVSS | EIK | | | | | | |
| | (SEQ | (SEQ | | | | | | |
| | ID | ID | | | | | | |
| | NO: | NO: | | | | | | |
| | 1480) | 1367) | | | | | | |

[0396] In some embodiments, the variable heavy chain domain comprises a first CDR of SEQ ID NO: 90, a second CDR of SEQ ID NO: 91, and a third CDR of SEQ ID NO: 92. In some embodiments, the variable heavy chain domain comprises a first CDR of SEQ ID NO: 359, a second CDR of SEQ ID NO: 170, and a third CDR of SEQ ID NO: 360. In some embodiments, the variable heavy chain domain comprises a first CDR of SEQ ID NO: 135, a second CDR of SEQ ID NO: 381, and a third CDR of SEQ ID NO: 382. In some embodiments, the variable heavy chain domain comprises a first CDR of SEQ ID NO: 359, a second CDR of SEQ ID NO: 170, and a third CDR of SEQ ID NO: 1431. These are illustrative only and the CDR sets as set forth herein and in the tables are also provided.

[0397] In some embodiments, the LinkerA is a glycine/serine linker, which can be any glycine/serine linker provided for herein. In some embodiments, the linker is a sequence of GGGGSGGGGSGGGGSGGGGS (SEQ ID NO: 22) or GGGGSGGGGSGGGGS (SEQ ID NO: 30). These are non-limiting examples and the linker can have varying number of GGGGS (SEQ ID NO: 23) or GGGGA repeats (SEQ ID NO: 29), or a mixture of the two. In some embodiments, the linker comprises 1, 2, 3, 4, 5, 6, 7, 8, 9, or 10 of the GGGGS (SEQ ID NO: 23) and/or GGGGA repeats (SEQ ID NO: 29) repeats (repeats disclosed as SEQ ID NOS 1550-1551, respectively). In some embodiments, the linker is 10 amino acids in length. In some embodiments, the linker is 5 amino acids in length. In some embodiments, the linker is 15 amino acids in length. In some embodiments, the linker is 20 amino acids in length. In some embodiments, the linker is 25 amino acids in length. In some embodiments, the linker is 30 amino acids in length. In some embodiments, the linker is 35 amino acids in length. In some embodiments, the linker is from 5-50 amino acids in length.

[0398] In some embodiments, the IL-2 mutein comprises a sequence of SEQ ID NO: 31. In some embodiments, the IL-2 mutein comprises a sequence of SEQ ID NO: 32. In some embodiments, the IL-2 mutein comprises a sequence of SEQ ID NO: 33. In some embodiments, the IL-2 mutein comprises a sequence of SEQ ID NO: 34. In some embodiments, the IL-2 mutein comprises a sequence of SEQ ID NO: 35. In some embodiments, the IL-2 mutein comprises a sequence of SEQ ID NO: 36. In some embodiments, the IL-2 mutein comprises a sequence of SEQ ID NO: 37. In some embodiments, the IL-2 mutein comprises a sequence of SEQ ID NO: 38. In some embodiments, the IL-2 mutein comprises a sequence of SEQ ID NO: 39. In some embodiments, the IL-2 mutein comprises a sequence of SEQ ID NO: 40. In some embodiments, the IL-2 mutein comprises a sequence of SEQ ID NO: 41. In some embodiments, the IL-2 mutein further comprises a T3A substitution (mutation). In some embodiments, the Fc Region comprises a peptide having a sequence of SEQ ID NO: 21. In some embodiments, the Fc Region comprises a peptide having a sequence of SEQ ID NO: 28. In some embodiments, the C-terminus of the Fc Region is linked to the N-terminus or the C-terminus of the variable heavy chain or IL-2 mutein. In some embodiments, the linker linking the Fc Region to the variable heavy chain or the IL-2 mutein is a glycine/serine or a glycine/alanine linker. In some embodiments, the linker linking the Fc region to the C- or N-terminus of the variable heavy chain or TL-2 mutein is a glycine/serine linker, which can be a sequence of GGGGSGGGGSGGGGSGGGGS (SEQ ID NO: 22) or GGGGSGGGGSGGGGS (SEQ ID NO: 30). These are non-limiting examples and the linker can have varying number of GGGGS (SEQ ID NO: 23) or GGGGA (SEQ ID NO: 29) repeats, or a mixture of the two. In some embodiments, the linker comprises 1, 2, 3, 4, 5, 6, 7, 8, 9, or 10 of the GGGGS (SEQ ID NO: 23) and/or GGGGA (SEQ ID NO: 29) repeats (repeats disclosed as SEQ ID NOS 1550-1551, respectively). In some embodiments, the linker is 10 amino acids in length. In some embodiments, the linker is 5 amino acids in length. In some embodiments, the linker is 15 amino acids in length. In some embodiments, the linker is 20 amino acids in length. In some embodiments, the linker is 25 amino acids in length. In some embodiments, the linker is 30 amino acids in length. In some embodiments, the linker is 35 amino acids in length. In some embodiments, the linker is from 5-50 amino acids in length.

[0399] In some embodiments, the polypeptide further comprises a polypeptide of formula VL-ConstantDomainLight, wherein VL is a variable light chain and ConstantDomainLight is an IgG light chain constant domain, wherein the polypeptide can be or is associated with the polypeptide having the formula of Ab-ConstantDomain-LinkerA-IL2Mutein-LinkerB-FcRegion. In some embodiments, the VL comprises a sequence of SEQ ID NO: 415, SEQ ID NO: 592, SEQ ID NO: 600 or SEQ ID NO: 1363. These are illustrative only and the VL domain can be VL/VK sequence provided for herein, such as in Table 7 or Table 9. In some embodiments, the variable light chain domain comprises a first CDR of SEQ ID NO: 93, a second CDR of SEQ ID NO: 87, and a third CDR of SEQ ID NO: 94. In some embodiments, the variable light chain domain comprises a first CDR of SEQ ID NO: 361, a second CDR of SEQ ID NO: 362, and a third CDR of SEQ ID NO: 363. In some embodiments, the variable heavy chain domain comprises a first CDR of SEQ ID NO: 383, a second CDR of SEQ ID NO: 384, and a third CDR of SEQ ID NO: 385. In some embodiments, the variable heavy chain domain comprises a first CDR of SEQ ID NO: 1408, a second CDR of SEQ ID NO: 362, and a third CDR of SEQ ID NO: 363. These are illustrative only and the CDR sets as set forth herein and in the tables are also provided.

[0400] In some embodiments, the constant domain also comprises mutations to negate the effector function, such as those provided for herein. In some embodiments, the ConstantDomainLight comprises a sequence of:

(SEQ ID NO: 45)
RTVAAPSVFIFPPSDEQLKSGTASVVCLLNNFYPREAKVQWKVDNALQSG
NSQESVTEQDSKDSTYSLSSTLTLSKADYEKHKVYACEVTHQGLSSPVTK
SFNRGEC.

[0401] The different polypeptides of formula IL2Mutein-LinkerA-FcRegion-LinkerB-Ab and VL-ConstantDomainLight can be interchanged with one another. In some embodiments, the polypeptide comprises a variable heavy chain comprising a first CDR of SEQ ID NO: 90, a second CDR of SEQ ID NO: 91, and a third CDR of SEQ ID NO: 92 and a variable light chain comprising a first CDR of SEQ ID NO: 93, a second CDR of SEQ ID NO: 87, and a third CDR of SEQ ID NO: 94. In some embodiments, the polypeptide comprises a variable heavy chain comprising a first CDR of SEQ ID NO: 359, a second CDR of SEQ ID NO: 170, and a third CDR of SEQ ID NO: 360 and a variable light chain comprising a first CDR of SEQ ID NO: 361, a second CDR of SEQ ID NO: 362, and a third CDR of SEQ ID NO: 363. In some embodiments, the polypeptide comprises a variable heavy chain comprising a first CDR of SEQ ID NO: 135, a second CDR of SEQ ID NO: 381, and a third CDR of SEQ ID NO: 382 and a variable light chain comprising a first CDR of SEQ ID NO: 383, a second CDR of SEQ ID NO: 384, and a third CDR of SEQ ID NO: 385. In some embodiments, the polypeptide comprises a variable heavy chain comprising a first CDR of SEQ ID NO: 359, a second CDR of SEQ ID NO: 170, and a third CDR of SEQ ID NO: 1431; and a variable light chain comprising a first CDR of SEQ ID NO: 1408, a second CDR of SEQ ID NO: 362, and a third CDR of SEQ ID NO: 363. These are non-limiting examples and the CDR combinations as illustrated in the Table 9 and Table 14 can be also be used and are provided for herein.

[0402] In some embodiments, compounds are provided comprising the following formula, from N-terminus to C-terminus:

[0403] IL2Mutein-LinkerA-FcRegion-LinkerB-Ab, wherein the IL2Mutein is any IL-2 mutein that can, for example, preferentially activate Tregs; the Linker A and Linker B are, each, independently, a linker as provided herein, the Fc Region can any one of such as provided herein, and the Ab is a tissue targeting moiety, such as those provided herein. In some embodiments, the Ab is an antibody that binds to MAdCAM or another cell surface target as provided herein. In some embodiments, the antibody is in a scFV format. In some embodiments, the antibody in scFV format is an antibody as provided in the Table 6 or Table 14. In some embodiments, the antibody in scFV format is an antibody that comprises the CDRs as set forth in Table 6, Table 7, Table 11, or Table 14.

[0404] In some embodiments, the C-terminus of the IL-2 mutein is linked to the N-terminus of the Fc region. In some embodiments, the linkage is direct or through a linker, such as those described herein. In some embodiments, the linker is a glycine/serine linker. In some embodiments, the linker linking the IL-2 mutein to the Fc region is a glycine/serine linker. In some embodiments, the glycine/serine linker comprises or consists of a sequence of GGGGSGGGGSGGGGSGGGGS (SEQ ID NO: 22) or GGGGSGGGGSGGGGS (SEQ ID NO: 30). These are non-limiting examples and the linker can have varying number of GGGGS (SEQ ID NO: 23) or GGGGA (SEQ ID NO: 29) repeats, or a mixture of the two. In some embodiments, the linker comprises 1, 2, 3, 4, 5, 6, 7, 8, 9, or 10 of the GGGGS (SEQ ID NO: 23) and/or GGGGA (SEQ ID NO: 29) repeats (repeats disclosed as SEQ ID NOS 1550-1551, respectively). In some embodiments, the linker is 10 amino acids in length. In some embodiments, the linker is 5 amino acids in length. In some embodiments, the linker is 15 amino acids in length. In some embodiments, the linker is 20 amino acids in length. In some embodiments, the linker is 25 amino acids in length. In some embodiments, the linker is 30 amino acids in length. In some embodiments, the linker is 35 amino acids in length. In some embodiments, the linker is from 5-50 amino acids in length.

[0405] In some embodiments, the IL-2 mutein comprises a sequence of SEQ ID NO: 31. In some embodiments, the IL-2 mutein comprises a sequence of SEQ ID NO: 32. In some embodiments, the IL-2 mutein comprises a sequence of SEQ ID NO: 33. In some embodiments, the IL-2 mutein comprises a sequence of SEQ ID NO: 34. In some embodiments, the IL-2 mutein comprises a sequence of SEQ ID NO: 35. In some embodiments, the IL-2 mutein comprises a sequence of SEQ ID NO: 36. In some embodiments, the IL-2 mutein comprises a sequence of SEQ ID NO: 37. In some embodiments, the IL-2 mutein comprises a sequence of SEQ ID NO: 38. In some embodiments, the IL-2 mutein comprises a sequence of SEQ ID NO: 39. In some embodiments, the IL-2 mutein comprises a sequence of SEQ ID NO: 40. In some embodiments, the IL-2 mutein comprises a sequence of SEQ ID NO: 41. In some embodiments, the IL-2 mutein further comprises a T3A substitution (mutation). In some embodiments, the Fc Region comprises a peptide having a sequence of SEQ ID NO: 21. In some embodiments, the Fc Region comprises a peptide having a sequence of SEQ ID NO: 28. In some embodiments, the C-terminus of the Fc Region is linked to the N-terminus of the variable heavy chain. In some embodiments, the linker linking the Fc Region to the variable heavy chain is a glycine/serine or a glycine/alanine linker. In some embodiments, the linker linking the Fc region to the N-terminus of the variable heavy chain is a glycine/serine linker, which can be a sequence of GGGGSGGGGSGGGGSGGGGS (SEQ ID NO: 22) or GGGGSGGGGSGGGGS (SEQ ID NO: 30). These are non-limiting examples and the linker can have varying number of GGGGS (SEQ ID NO: 23) or GGGGA (SEQ ID NO: 29) repeats, or a mixture of the two. In some embodiments, the linker comprises 1, 2, 3, 4, 5, 6, 7, 8, 9, or 10 of the GGGGS (SEQ ID NO: 23) and/or GGGGA (SEQ ID NO: 29) repeats (repeats disclosed as SEQ ID NOS 1550-1551, respectively). In some embodiments, the linker is 10 amino acids in length. In some embodiments, the linker is 5 amino acids in length. In some embodiments, the linker is 15 amino acids in length. In some embodiments, the linker is 20 amino acids in length. In some embodiments, the linker is 25 amino acids in length. In some embodiments, the linker is 30 amino acids in length. In some embodiments, the linker is 35 amino acids in length. In some embodiments, the linker is from 5-50 amino acids in length.

[0406] In some embodiments, the variable heavy chain comprises the CDRs as set forth in Table 6, Table 7, Table 9, or Table 14. In some embodiments, the variable heavy chain comprises a HCDR1, HCDR2, and a HCDR3, wherein the HCDR1, HCDR2, and a HCDR3 are as set forth in Table 6, Table 7, Table 9, or Table 14. In some embodiments, the variable heavy chain has a HCDR1, HCDR2, and a HCDR3 as set forth for Clone 1 in Table 6. In some embodiments, the variable heavy chain has a HCDR1, HCDR2, and a HCDR3 as set forth for Clone 2 in Table 6. In some embodiments, the variable heavy chain has a HCDR1, HCDR2, and a HCDR3 as set forth for Clone 3 in Table 6. In some embodiments, the variable heavy chain has a HCDR1, HCDR2, and a HCDR3 as set forth for Clone 4 in Table 6. In some embodiments, the variable heavy chain has a HCDR1, HCDR2, and a HCDR3 as set forth for Clone 5 in Table 6. In some embodiments, the variable heavy chain has a HCDR1, HCDR2, and a HCDR3 as set forth for Clone 6 in Table 6. In some embodiments, the variable heavy chain has a HCDR1, HCDR2, and a HCDR3 as set forth for Clone 7 in Table 6. In some embodiments, the variable heavy chain has a HCDR1, HCDR2, and a HCDR3 as set forth for Clone 8 in Table 6. In some embodiments, the variable heavy chain has a HCDR1, HCDR2, and a HCDR3 as set forth for Clone 9 in Table 6. In some embodiments, the variable heavy chain has a HCDR1, HCDR2, and a HCDR3 as set forth for Clone 10 in Table 6. In some embodiments, the variable heavy chain has a HCDR1, HCDR2, and a HCDR3 as set forth for Clone 11 in Table 6. In some embodiments, the variable heavy chain has a HCDR1, HCDR2, and a HCDR3 as set forth for Clone 12 in Table 6. In some embodiments, the variable heavy chain has a HCDR1, HCDR2, and a HCDR3 as set forth for Clone 13 in Table 6. In some embodiments, the variable heavy chain has a HCDR1, HCDR2, and a HCDR3 as set forth for Clone 14 in Table 6. In some embodiments, the variable heavy chain has a HCDR1, HCDR2, and a HCDR3 as set forth for Clone 15 in Table 6. In some embodiments, the variable heavy chain has a HCDR1, HCDR2, and a HCDR3 as set forth for Clone 16 in Table 6. In some embodiments, the variable heavy chain has a HCDR1, HCDR2, and a HCDR3 as set forth for Clone 17 in Table 6. In some embodiments, the variable heavy chain has a HCDR1, HCDR2, and a HCDR3 as set forth for Clone 1 in Table 6. In some embodiments, the variable heavy chain has a HCDR1, HCDR2, and a HCDR3 as set forth for Clone 18 in Table 6. In some embodiments, the variable heavy chain has a HCDR1, HCDR2, and a HCDR3 as set forth for Clone 19 in Table 6. In some embodiments, the variable heavy chain has a HCDR1, HCDR2, and a HCDR3 as set forth for Clone 20 in Table 6. In some embodiments, the variable heavy chain has a HCDR1, HCDR2, and a HCDR3 as set forth for Clone 21 in Table 6. In some embodiments, the variable heavy chain has a HCDR1, HCDR2, and a HCDR3 as set forth for Clone 22 in Table 6. In some embodiments, the variable heavy chain has a HCDR1, HCDR2, and a HCDR3 as set forth for Clone 23 in Table 6. In some embodiments, the variable heavy chain has a HCDR1, HCDR2, and a HCDR3 as set forth for Clone 24 in Table 6. In some embodiments, the variable heavy chain has a HCDR1, HCDR2, and a HCDR3 as set forth for Clone 25 in Table 6. In some embodiments, the variable heavy chain has a HCDR1, HCDR2, and a HCDR3 as set forth for Clone 26 in Table 6. In some embodiments, the variable heavy chain has a HCDR1, HCDR2, and a HCDR3 as set forth for Clone 27 in Table 6. In some embodiments, the variable heavy chain has a HCDR1, HCDR2, and a HCDR3 as set forth for Clone 28 in Table 6. In some embodiments, the variable heavy chain has a HCDR1, HCDR2, and a HCDR3 as set forth for Clone 29 in Table 6. In some embodiments, the variable heavy chain has a HCDR1, HCDR2, and a HCDR3 as set forth for Clone 30 in Table 6. In some embodiments, the variable heavy chain has a HCDR1, HCDR2, and a HCDR3 as set forth for Clone 31 in Table 6. In some embodiments, the variable heavy chain has a HCDR1, HCDR2, and a HCDR3 as set forth for Clone 32 in Table 6. In some embodiments, the variable heavy chain has a HCDR1, HCDR2, and a HCDR3 as set forth for Clone 33 in Table 6. In some embodiments, the variable heavy chain has a HCDR1, HCDR2, and a HCDR3 as set forth for Clone 34 in Table 6. In some embodiments, the variable heavy chain has a HCDR1, HCDR2, and a HCDR3 as set forth for Clone 35 in Table 6. In some embodiments, the variable heavy chain has a HCDR1, HCDR2, and a HCDR3 as set forth for Clone 36 in Table 6. In some embodiments, the variable heavy chain has a HCDR1, HCDR2, and a HCDR3 as set forth for Clone 37 in Table 6. In some embodiments, the variable heavy chain has a HCDR1, HCDR2, and a HCDR3 as set forth for Clone 38 in Table 6. In some embodiments, the variable heavy chain has a HCDR1, HCDR2, and a HCDR3 as set forth for Clone 39 in Table 6. In some embodiments, the variable heavy chain has a HCDR1, HCDR2, and a HCDR3 as set forth for Clone 40 in Table 6. In some embodiments, the variable heavy chain has a HCDR1, HCDR2, and a HCDR3 as set forth for Clone 41 in Table 6. In some embodiments, the variable heavy chain has a HCDR1, HCDR2, and a HCDR3 as set forth for Clone 42 in Table 6. In some embodiments, the variable heavy chain has a HCDR1, HCDR2, and a HCDR3 as set forth for Clone 43 in Table 6. In some embodiments, the variable heavy chain has a HCDR1, HCDR2, and a HCDR3 as set forth for Clone 44 in Table 6. In some embodiments, the variable heavy chain has a HCDR1, HCDR2, and a HCDR3 as set forth for Clone 45 in Table 6. In some embodiments, the variable heavy chain has a HCDR1, HCDR2, and a HCDR3 as set forth for Clone 46 in Table 6. In some embodiments, the variable heavy chain has a HCDR1, HCDR2, and a HCDR3 as set forth for Clone 47 in Table 6. In some embodiments, the variable heavy chain has a HCDR1, HCDR2, and a HCDR3 as set forth for Clone 48 in Table 6. In some embodiments, the variable heavy chain has a HCDR1, HCDR2, and a HCDR3 as set forth for Clone 49 in Table 6. In some embodiments, the variable heavy chain has a HCDR1, HCDR2, and a HCDR3 as set forth for Clone 50 in Table 6. In some embodiments, the variable heavy chain has a HCDR1, HCDR2, and a HCDR3 as set forth for Clone 51 in Table 6. In some embodiments, the variable heavy chain has a HCDR1, HCDR2, and a HCDR3 as set forth for Clone 52 in Table 6. In some embodiments, the variable heavy chain has a HCDR1, HCDR2, and a HCDR3 as set forth for Clone 53 in Table 6. In some embodiments, the variable heavy chain has a HCDR1, HCDR2, and a HCDR3 as set forth for Clone 54 in Table 6. In some embodiments, the variable heavy chain has a HCDR1, HCDR2, and a HCDR3 as set forth for Clone 55 in Table 6. In some embodiments, the variable heavy chain has a HCDR1, HCDR2, and a HCDR3 as set forth for Clone 56 in Table 6. In some embodiments, the variable heavy chain has a HCDR1, HCDR2, and a HCDR3 as set forth for Clone 57 in Table 6. In some embodiments, the variable heavy chain has a HCDR1, HCDR2, and a HCDR3 as set forth for Clone 58 in Table 6. In some embodiments, the variable heavy chain has a HCDR1, HCDR2, and a HCDR3 as set forth for Clone 59 in Table 6. In some embodiments, the variable heavy chain has a HCDR1, HCDR2, and a HCDR3 as set forth for Clone 60 in Table 6. In some embodiments, the variable heavy chain has a HCDR1, HCDR2, and a HCDR3 as set forth for Clone 61 in Table 6. In some embodiments, the variable heavy chain has a HCDR1, HCDR2, and a HCDR3 as set forth for Clone 62 in Table 6. In some embodiments, the variable heavy chain has a HCDR1, HCDR2, and a HCDR3 as set forth for Clone 63 in Table 6. In some embodiments, the variable heavy chain has a HCDR1, HCDR2, and a HCDR3 as set forth for Clone 64 in Table 6. In some embodiments, the variable heavy chain has a HCDR1, HCDR2, and a HCDR3 as set forth for Clone 65 in Table 6. In some embodiments, the variable heavy chain has a HCDR1, HCDR2, and a HCDR3 as set forth for Clone 66 in Table 6.

[0407] In some embodiments, the variable heavy chain has a HCDR1, HCDR2, and a HCDR3 as set forth for Clone 1 in Table 7. In some embodiments, the variable heavy chain has a HCDR1, HCDR2, and a HCDR3 as set forth for Clone 2 in Table 7. In some embodiments, the variable heavy chain has a HCDR1, HCDR2, and a HCDR3 as set forth for Clone 3 in Table 7. In some embodiments, the variable heavy chain has a HCDR1, HCDR2, and a HCDR3 as set forth for Clone 4 in Table 7. In some embodiments, the variable heavy chain has a HCDR1, HCDR2, and a HCDR3 as set forth for Clone 5 in Table 7. In some embodiments, the variable heavy chain has a HCDR1, HCDR2, and a HCDR3 as set forth for Clone 6 in Table 7. In some embodiments, the variable heavy chain has a HCDR1, HCDR2, and a HCDR3 as set forth for Clone 7 in Table 7. In some embodiments, the variable heavy chain has a HCDR1, HCDR2, and a HCDR3 as set forth for Clone 8 in Table 7. In some embodiments, the variable heavy chain has a HCDR1, HCDR2, and a HCDR3 as set forth for Clone 9 in Table 7. In some embodiments, the variable heavy chain has a HCDR1, HCDR2, and a HCDR3 as set forth for Clone 10 in Table 7. In some embodiments, the variable heavy chain has a HCDR1, HCDR2, and a HCDR3 as set forth for Clone 11 in Table 7. In some embodiments, the variable heavy chain has a HCDR1, HCDR2, and a HCDR3 as set forth for Clone 12 in Table 7. In some embodiments, the variable heavy chain has a HCDR1, HCDR2, and a HCDR3 as set forth for Clone 13 in Table 7. In some embodiments, the variable heavy chain has a HCDR1, HCDR2, and a HCDR3 as set forth for Clone 14 in Table 7. In some embodiments, the variable heavy chain has a HCDR1, HCDR2, and a HCDR3 as set forth for Clone 15 in Table 7. In some embodiments, the variable heavy chain has a HCDR1, HCDR2, and a HCDR3 as set forth for Clone 16 in Table 7. In some embodiments, the variable heavy chain has a HCDR1, HCDR2, and a HCDR3 as set forth for Clone 17 in Table 7. In some embodiments, the variable heavy chain has a HCDR1, HCDR2, and a HCDR3 as set forth for Clone 1 in Table 7. In some embodiments, the variable heavy chain has a HCDR1, HCDR2, and a HCDR3 as set forth for Clone 18 in Table 7. In some embodiments, the variable heavy chain has a HCDR1, HCDR2, and a HCDR3 as set forth for Clone 19 in Table 7. In some embodiments, the variable heavy chain has a HCDR1, HCDR2, and a HCDR3 as set forth for Clone 20 in Table 7. In some embodiments, the variable heavy chain has a HCDR1, HCDR2, and a HCDR3 as set forth for Clone 21 in Table 7. In some embodiments, the variable heavy chain has a HCDR1, HCDR2, and a HCDR3 as set forth for Clone 22 in Table 7. In some embodiments, the variable heavy chain has a HCDR1, HCDR2, and a HCDR3 as set forth for Clone 23 in Table 7. In some embodiments, the variable heavy chain has a HCDR1, HCDR2, and a HCDR3 as set forth for Clone 24 in Table 7. In some embodiments, the variable heavy chain has a HCDR1, HCDR2, and a HCDR3 as set forth for Clone 25 in Table 7. In some embodiments, the variable heavy chain has a HCDR1, HCDR2, and a HCDR3 as set forth for Clone 26 in Table 7. In some embodiments, the variable heavy chain has a HCDR1, HCDR2, and a HCDR3 as set forth for Clone 27 in Table 7. In some embodiments, the variable heavy chain has a HCDR1, HCDR2, and a HCDR3 as set forth for Clone 28 in Table 7. In some embodiments, the variable heavy chain has a HCDR1, HCDR2, and a HCDR3 as set forth for Clone 29 in Table 7. In some embodiments, the variable heavy chain has a HCDR1, HCDR2, and a HCDR3 as set forth for Clone 30 in Table 7. In some embodiments, the variable heavy chain has a HCDR1, HCDR2, and a HCDR3 as set forth for Clone 31 in Table 7. In some embodiments, the variable heavy chain has a HCDR1, HCDR2, and a HCDR3 as set forth for Clone 32 in Table 7. In some embodiments, the variable heavy chain has a HCDR1, HCDR2, and a HCDR3 as set forth for Clone 33 in Table 7. In some embodiments, the variable heavy chain has a HCDR1, HCDR2, and a HCDR3 as set forth for Clone 34 in Table 7. In some embodiments, the variable heavy chain has a HCDR1, HCDR2, and a HCDR3 as set forth for Clone 35 in Table 7. In some embodiments, the variable heavy chain has a HCDR1, HCDR2, and a HCDR3 as set forth for Clone 36 in Table 7. In some embodiments, the variable heavy chain has a HCDR1, HCDR2, and a HCDR3 as set forth for Clone 37 in Table 7. In some embodiments, the variable heavy chain has a HCDR1, HCDR2, and a HCDR3 as set forth for Clone 38 in Table 7. In some embodiments, the variable heavy chain has a HCDR1, HCDR2, and a HCDR3 as set forth for Clone 39 in Table 7. In some embodiments, the variable heavy chain has a HCDR1, HCDR2, and a HCDR3 as set forth for Clone 40 in Table 7. In some embodiments, the variable heavy chain has a HCDR1, HCDR2, and a HCDR3 as set forth for Clone 41 in Table 7. In some embodiments, the variable heavy chain has a HCDR1, HCDR2, and a HCDR3 as set forth for Clone 42 in Table 7. In some embodiments, the variable heavy chain has a HCDR1, HCDR2, and a HCDR3 as set forth for Clone 43 in Table 7. In some embodiments, the variable heavy chain has a HCDR1, HCDR2, and a HCDR3 as set forth for Clone 44 in Table 7. In some embodiments, the variable heavy chain has a HCDR1, HCDR2, and a HCDR3 as set forth for Clone 45 in Table 7. In some embodiments, the variable heavy chain has a HCDR1, HCDR2, and a HCDR3 as set forth for Clone 46 in Table 7. In some embodiments, the variable heavy chain has a HCDR1, HCDR2, and a HCDR3 as set forth for Clone 47 in Table 7. In some embodiments, the variable heavy chain has a HCDR1, HCDR2, and a HCDR3 as set forth for Clone 48 in Table 7. In some embodiments, the variable heavy chain has a HCDR1, HCDR2, and a HCDR3 as set forth for Clone 49 in Table 7. In some embodiments, the variable heavy chain has a HCDR1, HCDR2, and a HCDR3 as set forth for Clone 50 in Table 7. In some embodiments, the variable heavy chain has a HCDR1, HCDR2, and a HCDR3 as set forth for Clone 51 in Table 7. In some embodiments, the variable heavy chain has a HCDR1, HCDR2, and a HCDR3 as set forth for Clone 52 in Table 7. In some embodiments, the variable heavy chain has a HCDR1, HCDR2, and a HCDR3 as set forth for Clone 53 in Table 7. In some embodiments, the variable heavy chain has a HCDR1, HCDR2, and a HCDR3 as set forth for Clone 54 in Table 7. In some embodiments, the variable heavy chain has a HCDR1, HCDR2, and a HCDR3 as set forth for Clone 55 in Table 7. In some embodiments, the variable heavy chain has a HCDR1, HCDR2, and a HCDR3 as set forth for Clone 56 in Table 7. In some embodiments, the variable heavy chain has a HCDR1, HCDR2, and a HCDR3 as set forth for Clone 57 in Table 7. In some embodiments, the variable heavy chain has a HCDR1, HCDR2, and a HCDR3 as set forth for Clone 58 in Table 7. In some embodiments, the variable heavy chain has a HCDR1, HCDR2, and a HCDR3 as set forth for Clone 59 in Table 7. In some embodiments, the variable heavy chain has a HCDR1, HCDR2, and a HCDR3 as set forth for Clone 60 in Table 7. In some embodiments, the variable heavy chain has a HCDR1, HCDR2, and a HCDR3 as set forth for Clone 61 in Table 7. In some embodiments, the variable heavy chain has a HCDR1, HCDR2, and a HCDR3 as set forth for Clone 62 in Table 7. In some embodiments, the variable heavy chain has a HCDR1, HCDR2, and a HCDR3 as set forth for Clone 63 in Table 7. In some embodiments, the variable heavy chain has a HCDR1, HCDR2, and a HCDR3 as set forth for Clone 64 in Table 7. In some embodiments, the variable heavy chain has a HCDR1, HCDR2, and a HCDR3 as set forth for Clone 65 in Table 7. In some embodiments, the variable heavy chain has a HCDR1, HCDR2, and a HCDR3 as set forth for Clone 66 in Table 7. In some embodiments, the variable heavy chain has a HCDR1, HCDR2, and a HCDR3 as set forth for Clone 67 in Table 7. In some embodiments, the variable heavy chain has a HCDR1, HCDR2, and a HCDR3 as set forth for Clone 68 in Table 7. In some embodiments, the variable heavy chain has a HCDR1, HCDR2, and a HCDR3 as set forth for Clone 69 in Table 7. In some embodiments, the variable heavy chain has a HCDR1, HCDR2, and a HCDR3 as set forth for Clone 70 in Table 7. In some embodiments, the variable heavy chain has a HCDR1, HCDR2, and a HCDR3 as set forth for Clone 71 in Table 7. In some embodiments, the variable heavy chain has a HCDR1, HCDR2, and a HCDR3 as set forth for Clone 72 in Table 7. In some embodiments, the variable heavy chain has a HCDR1, HCDR2, and a HCDR3 as set forth for Clone 73 in Table 7. In some embodiments, the variable heavy chain has a HCDR1, HCDR2, and a HCDR3 as set forth for Clone 74 in Table 7. In some embodiments, the variable heavy chain has a HCDR1, HCDR2, and a HCDR3 as set forth for Clone 75 in Table 7. In some embodiments, the variable heavy chain has a HCDR1, HCDR2, and a HCDR3 as set forth for Clone 76 in Table 7. In some embodiments, the variable heavy chain has a HCDR1, HCDR2, and a HCDR3 as set forth for Clone 77 in Table 7. In some embodiments, the variable heavy chain has a HCDR1, HCDR2, and a HCDR3 as set forth for Clone 78 in Table 7. In some embodiments, the variable heavy chain has a HCDR1, HCDR2, and a HCDR3 as set forth for Clone 79 in Table 7. In some embodiments, the variable heavy chain has a HCDR1, HCDR2, and a HCDR3 as set forth for Clone 80 in Table 7. In some embodiments, the variable heavy chain has a HCDR1, HCDR2, and a HCDR3 as set forth for Clone 81 in Table 7. In some embodiments, the variable heavy chain has a HCDR1, HCDR2, and a HCDR3 as set forth for Clone 82 in Table 7. In some embodiments, the variable heavy chain has a HCDR1, HCDR2, and a HCDR3 as set forth for Clone 83 in Table 7. In some embodiments, the variable heavy chain has a HCDR1, HCDR2, and a HCDR3 as set forth for Clone 84 in Table 7.

[0408] In some embodiments, the variable heavy chain has a HCDR1, HCDR2, and a HCDR3 as set forth for MIAB128 in Table 9. In some embodiments, the variable heavy chain has a HCDR1, HCDR2, and a HCDR3 as set forth for MIAB128A in Table 9. In some embodiments, the variable heavy chain has a HCDR1, HCDR2, and a HCDR3 as set forth for MIAB129 in Table 9. In some embodiments, the variable heavy chain has a HCDR1, HCDR2, and a HCDR3 as set forth for MIAB130 in Table 9. In some embodiments, the variable heavy chain has a HCDR1, HCDR2, and a HCDR3 as set forth for MIAB131 in Table 9. In some embodiments, the variable heavy chain has a HCDR1, HCDR2, and a HCDR3 as set forth for MIAB132 in Table 9. In some embodiments, the variable heavy chain has a HCDR1, HCDR2, and a HCDR3 as set forth for MIAB133 in Table 9. In some embodiments, the variable heavy chain has a HCDR1, HCDR2, and a HCDR3 as set forth for MIAB134 in Table 9. In some embodiments, the variable heavy chain has a HCDR1, HCDR2, and a HCDR3 as set forth for MIAB135 in Table 9. In some embodiments, the variable heavy chain has a HCDR1, HCDR2, and a HCDR3 as set forth for MIAB136 in Table 9. In some embodiments, the variable heavy chain has a HCDR1, HCDR2, and a HCDR3 as set forth for MIAB137 in Table 9. In some embodiments, the variable heavy chain has a HCDR1, HCDR2, and a HCDR3 as set forth for MIAB138 in Table 9. In some embodiments, the variable heavy chain has a HCDR1, HCDR2, and a HCDR3 as set forth for MIAB139 in Table 9. In some embodiments, the variable heavy chain has a HCDR1, HCDR2, and a HCDR3 as set forth for MIAB140 in Table 9. In some embodiments, the variable heavy chain has a HCDR1, HCDR2, and a HCDR3 as set forth for MIAB141 in Table 9. In some embodiments, the variable heavy chain has a HCDR1, HCDR2, and a HCDR3 as set forth for MIAB142 in Table 9. In some embodiments, the variable heavy chain has a HCDR1, HCDR2, and a HCDR3 as set forth for MIAB143 in Table 9. In some embodiments, the variable heavy chain has a HCDR1, HCDR2, and a HCDR3 as set forth for MIAB144 in Table 9. In some embodiments, the variable heavy chain has a HCDR1, HCDR2, and a HCDR3 as set forth for MIAB145 in Table 9. In some embodiments, the variable heavy chain has a HCDR1, HCDR2, and a HCDR3 as set forth for MIAB146 in Table 9. In some embodiments, the variable heavy chain has a HCDR1, HCDR2, and a HCDR3 as set forth for MIAB147 in Table 9. In some embodiments, the variable heavy chain has a HCDR1, HCDR2, and a HCDR3 as set forth for MIAB148 in Table 9. In some embodiments, the variable heavy chain has a HCDR1, HCDR2, and a HCDR3 as set forth for MIAB149 in Table 9. In some embodiments, the variable heavy chain has a HCDR1, HCDR2, and a HCDR3 as set forth for MIAB150 in Table 9. In some embodiments, the variable heavy chain has a HCDR1, HCDR2, and a HCDR3 as set forth for MIAB151 in Table 9. In some embodiments, the variable heavy chain has a HCDR1, HCDR2, and a HCDR3 as set forth for MIAB152 in Table 9. In some embodiments, the variable heavy chain has a HCDR1, HCDR2, and a HCDR3 as set forth for MIAB153 in Table 9. In some embodiments, the variable heavy chain has a HCDR1, HCDR2, and a HCDR3 as set forth for MIAB154 in Table 9. In some embodiments, the variable heavy chain has a HCDR1, HCDR2, and a HCDR3 as set forth for MIAB155 in Table 9. In some embodiments, the variable heavy chain has a HCDR1, HCDR2, and a HCDR3 as set forth for MIAB156 in Table 9. In some embodiments, the variable heavy chain has a HCDR1, HCDR2, and a HCDR3 as set forth for MIAB157 in Table 9. In some embodiments, the variable heavy chain has a HCDR1, HCDR2, and a HCDR3 as set forth for MIAB158 in Table 9. In some embodiments, the variable heavy chain has a HCDR1, HCDR2, and a HCDR3 as set forth for MIAB159 in Table 9. In some embodiments, the variable heavy chain has a HCDR1, HCDR2, and a HCDR3 as set forth for MIAB160 in Table 9. In some embodiments, the variable heavy chain has a HCDR1, HCDR2, and a HCDR3 as set forth for MIAB161 in Table 9. In some embodiments, the variable heavy chain has a HCDR1, HCDR2, and a HCDR3 as set forth for MIAB162 in Table 9. In some embodiments, the variable heavy chain has a HCDR1, HCDR2, and a HCDR3 as set forth for MIAB163 in Table 9. In some embodiments, the variable heavy chain has a HCDR1, HCDR2, and a HCDR3 as set forth for MIAB164 in Table 9. In some embodiments, the variable heavy chain has a HCDR1, HCDR2, and a HCDR3 as set forth for MIAB165 in Table 9. In some embodiments, the variable heavy chain has a HCDR1, HCDR2, and a HCDR3 as set forth for MIAB166 in Table 9. In some embodiments, the variable heavy chain has a HCDR1, HCDR2, and a HCDR3 as set forth for MIAB167 in Table 9. In some embodiments, the variable heavy chain has a HCDR1, HCDR2, and a HCDR3 as set forth for MIAB168 in Table 9. In some embodiments, the variable heavy chain has a HCDR1, HCDR2, and a HCDR3 as set forth for MIAB169 in Table 9. In some embodiments, the variable heavy chain has a HCDR1, HCDR2, and a HCDR3 as set forth for MIAB170 in Table 9. In some embodiments, the variable heavy chain has a HCDR1, HCDR2, and a HCDR3 as set forth for MIAB171 in Table 9. In some embodiments, the variable heavy chain has a HCDR1, HCDR2, and a HCDR3 as set forth for MIAB172 in Table 9. In some embodiments, the variable heavy chain has a HCDR1, HCDR2, and a HCDR3 as set forth for MIAB173 in Table 9. In some embodiments, the variable heavy chain has a HCDR1, HCDR2, and a HCDR3 as set forth for MIAB174 in Table 9. In some embodiments, the variable heavy chain has a HCDR1, HCDR2, and a HCDR3 as set forth for MIAB175 in Table 9. In some embodiments, the variable heavy chain has a HCDR1, HCDR2, and a HCDR3 as set forth for MIAB176 in Table 9. In some embodiments, the variable heavy chain has a HCDR1, HCDR2, and a HCDR3 as set forth for MIAB177 in Table 9. In some embodiments, the variable heavy chain has a HCDR1, HCDR2, and a HCDR3 as set forth for MIAB178 in Table 9. In some embodiments, the variable heavy chain has a HCDR1, HCDR2, and a HCDR3 as set forth for MIAB179 in Table 9. In some embodiments, the variable heavy chain has a HCDR1, HCDR2, and a HCDR3 as set forth for MIAB180 in Table 9. In some embodiments, the variable heavy chain has a HCDR1, HCDR2, and a HCDR3 as set forth for MIAB181 in Table 9. In some embodiments, the variable heavy chain has a HCDR1, HCDR2, and a HCDR3 as set forth for MIAB182 in Table 9. In some embodiments, the variable heavy chain has a HCDR1, HCDR2, and a HCDR3 as set forth for MIAB183 in Table 9. In some embodiments, the variable heavy chain has a HCDR1, HCDR2, and a HCDR3 as set forth for MIAB184 in Table 9. In some embodiments, the variable heavy chain has a HCDR1, HCDR2, and a HCDR3 as set forth for MIAB185 in Table 9. In some embodiments, the variable heavy chain has a HCDR1, HCDR2, and a HCDR3 as set forth for MIAB186 in Table 9. In some embodiments, the variable heavy chain has a HCDR1, HCDR2, and a HCDR3 as set forth for MIAB187 in Table 9. In some embodiments, the variable heavy chain has a HCDR1, HCDR2, and a HCDR3 as set forth for MIAB188 in Table 9. In some embodiments, the variable heavy chain has a HCDR1, HCDR2, and a HCDR3 as set forth for MIAB189 in Table 9. In some embodiments, the variable heavy chain has a HCDR1, HCDR2, and a HCDR3 as set forth for MIAB190 in Table 9. In some embodiments, the variable heavy chain has a HCDR1, HCDR2, and a HCDR3 as set forth for MIAB191 in Table 9. In some embodiments, the variable heavy chain has a HCDR1, HCDR2, and a HCDR3 as set forth for MIAB192 in Table 9. In some embodiments, the variable heavy chain has a HCDR1, HCDR2, and a HCDR3 as set forth for MIAB193 in Table 9. In some embodiments, the variable heavy chain has a HCDR1, HCDR2, and a HCDR3 as set forth for MIAB194 in Table 9. In some embodiments, the variable heavy chain has a HCDR1, HCDR2, and a HCDR3 as set forth for MIAB195 in Table 9. In some embodiments, the variable heavy chain has a HCDR1, HCDR2, and a HCDR3 as set forth for MIAB196 in Table 9. In some embodiments, the variable heavy chain has a HCDR1, HCDR2, and a HCDR3 as set forth for MIAB197 in Table 9. In some embodiments, the variable heavy chain has a HCDR1, HCDR2, and a HCDR3 as set forth for MIAB198 in Table 9.

[0409] In some embodiments, the variable heavy chain has a HCDR1, HCDR2, and a HCDR3 as set forth for PMAB1 in Table 14. In some embodiments, the variable heavy chain has a HCDR1, HCDR2, and a HCDR3 as set forth for PMAB3 in Table 14. In some embodiments, the variable heavy chain has a HCDR1, HCDR2, and a HCDR3 as set forth for PMAB4 in Table 14. In some embodiments, the variable heavy chain has a HCDR1, HCDR2, and a HCDR3 as set forth for PMAB5 in Table 14. In some embodiments, the variable heavy chain has a HCDR1, HCDR2, and a HCDR3 as set forth for PMAB6 in Table 14. In some embodiments, the variable heavy chain has a HCDR1, HCDR2, and a HCDR3 as set forth for PMAB7 in Table 14. In some embodiments, the variable heavy chain has a HCDR1, HCDR2, and a HCDR3 as set forth for PMAB8 in Table 14. In some embodiments, the variable heavy chain has a HCDR1, HCDR2, and a HCDR3 as set forth for PMAB9 in Table 14. In some embodiments, the variable heavy chain has a HCDR1, HCDR2, and a HCDR3 as set forth for PMAB1 in Table 14. In some embodiments, the variable heavy chain has a HCDR1, HCDR2, and a HCDR3 as set forth for PMAB10 in Table 14. In some embodiments, the variable heavy chain has a HCDR1, HCDR2, and a HCDR3 as set forth for PMAB11 in Table 14. In some embodiments, the variable heavy chain has a HCDR1, HCDR2, and a HCDR3 as set forth for PMAB12 in Table 14. In some embodiments, the variable heavy chain has a HCDR1, HCDR2, and a HCDR3 as set forth for PMAB13 in Table 14. In some embodiments, the variable heavy chain has a HCDR1, HCDR2, and a HCDR3 as set forth for PMAB14 in Table 14. In some embodiments, the variable heavy chain has a HCDR1, HCDR2, and a HCDR3 as set forth for PMAB15 in Table 14. In some embodiments, the variable heavy chain has a HCDR1, HCDR2, and a HCDR3 as set forth for PMAB16 in Table 14. In some embodiments, the variable heavy chain has a HCDR1, HCDR2, and a HCDR3 as set forth for PMAB1 in Table 14. In some embodiments, the variable heavy chain has a HCDR1, HCDR2, and a HCDR3 as set forth for PMAB19 in Table 14. In some embodiments, the variable heavy chain has a HCDR1, HCDR2, and a HCDR3 as set forth for PMAB20 in Table 14. In some embodiments, the variable heavy chain has a HCDR1, HCDR2, and a HCDR3 as set forth for PMAB21 in Table 14. In some embodiments, the variable heavy chain has a HCDR1, HCDR2, and a HCDR3 as set forth for PMAB22 in Table 14. In some embodiments, the variable heavy chain has a HCDR1, HCDR2, and a HCDR3 as set forth for PMAB23 in Table 14. In some embodiments, the variable heavy chain has a HCDR1, HCDR2, and a HCDR3 as set forth for PMAB24 in Table 14. In some embodiments, the variable heavy chain has a HCDR1, HCDR2, and a HCDR3 as set forth for PMAB25 in Table 14. In some embodiments, the variable heavy chain has a HCDR1, HCDR2, and a HCDR3 as set forth for PMAB26 in Table 14. In some embodiments, the variable heavy chain has a HCDR1, HCDR2, and a HCDR3 as set forth for PMAB27 in Table 14. In some embodiments, the variable heavy chain has a HCDR1, HCDR2, and a HCDR3 as set forth for PMAB28 in Table 14. In some embodiments, the variable heavy chain has a HCDR1, HCDR2, and a HCDR3 as set forth for PMAB29 in Table 14. In some embodiments, the variable heavy chain has a HCDR1, HCDR2, and a HCDR3 as set forth for PMAB30 in Table 14. In some embodiments, the variable heavy chain has a HCDR1, HCDR2, and a HCDR3 as set forth for PMAB31 in Table 14. In some embodiments, the variable heavy chain has a HCDR1, HCDR2, and a HCDR3 as set forth for PMAB32 in Table 14. In some embodiments, the variable heavy chain has a HCDR1, HCDR2, and a HCDR33 as set forth for PMAB33 in Table 14. In some embodiments, the variable heavy chain has a HCDR1, HCDR2, and a HCDR3 as set forth for PMAB34 in Table 14. In some embodiments, the variable heavy chain has a HCDR1, HCDR2, and a HCDR3 as set forth for PMAB35 in Table 14. In some embodiments, the variable heavy chain has a HCDR1, HCDR2, and a HCDR3 as set forth for PMAB36 in Table 14. In some embodiments, the variable heavy chain has a HCDR1, HCDR2, and a HCDR3 as set forth for PMAB37 in Table 14. In some embodiments, the variable heavy chain has a HCDR1, HCDR2, and a HCDR3 as set forth for PMAB38 in Table 14. In some embodiments, the variable heavy chain has a HCDR1, HCDR2, and a HCDR3 as set forth for PMAB39 in Table 14. In some embodiments, the variable heavy chain has a HCDR1, HCDR2, and a HCDR3 as set forth for PMAB40 in Table 14. In some embodiments, the variable heavy chain has a HCDR1, HCDR2, and a HCDR3 as set forth for PMAB41 in Table 14. In some embodiments, the variable heavy chain has a HCDR1, HCDR2, and a HCDR3 as set forth for PMAB42 in Table 14. In some embodiments, the variable heavy chain has a HCDR1, HCDR2, and a HCDR3 as set forth for PMAB43 in Table 14. In some embodiments, the variable heavy chain has a HCDR1, HCDR2, and a HCDR3 as set forth for PMAB44 in Table 14. In some embodiments, the variable heavy chain has a HCDR1, HCDR2, and a HCDR3 as set forth for PMAB45 in Table 14. In some embodiments, the variable heavy chain has a HCDR1, HCDR2, and a HCDR3 as set forth for PMAB46 in Table 14. In some embodiments, the variable heavy chain has a HCDR1, HCDR2, and a HCDR3 as set forth for PMAB47 in Table 14. In some embodiments, the variable heavy chain has a HCDR1, HCDR2, and a HCDR3 as set forth for PMAB48 in Table 14. In some embodiments, the variable heavy chain has a HCDR1, HCDR2, and a HCDR3 as set forth for PMAB49 in Table 14. In some embodiments, the variable heavy chain has a HCDR1, HCDR2, and a HCDR3 as set forth for PMAB50 in Table 14. In some embodiments, the variable heavy chain has a HCDR1, HCDR2, and a HCDR3 as set forth for PMAB51 in Table 14. In some embodiments, the variable heavy chain has a HCDR1, HCDR2, and a HCDR3 as set forth for PMAB52 in Table 14. In some embodiments, the variable heavy chain has a HCDR1, HCDR2, and a HCDR3 as set forth for PMAB53 in Table 14. In some embodiments, the variable heavy chain has a HCDR1, HCDR2, and a HCDR3 as set forth for PMAB55 in Table 14.

[0410] In some embodiments, the variable heavy chain has a HCDR1, HCDR2, and a HCDR3 as set forth for MIAB212 in Table 15. In some embodiments, the variable heavy chain has a HCDR1, HCDR2, and a HCDR3 as set forth for MIAB213 in Table 15. In some embodiments, the variable heavy chain has a HCDR1, HCDR2, and a HCDR3 as set forth for MIAB214 in Table 15.

[0411] In some embodiments, the variable light chain has a LCDR1, LCDR2, and a LCDR3 as set forth for Clone 1 in Table 6. In some embodiments, the variable heavy chain has a LCDR1, LCDR2, and a LCDR3 as set forth for Clone 2 in Table 6. In some embodiments, the variable heavy chain has a LCDR1, LCDR2, and a LCDR3 as set forth for Clone 3 in Table 6. In some embodiments, the variable heavy chain has a LCDR1, LCDR2, and a LCDR3 as set forth for Clone 4 in Table 6. In some embodiments, the variable heavy chain has a LCDR1, LCDR2, and a LCDR3 as set forth for Clone 5 in Table 6. In some embodiments, the variable heavy chain has a LCDR1, LCDR2, and a LCDR3 as set forth for Clone 6 in Table 6. In some embodiments, the variable heavy chain has a LCDR1, LCDR2, and a LCDR3 as set forth for Clone 7 in Table 6. In some embodiments, the variable heavy chain has a LCDR1, LCDR2, and a LCDR3 as set forth for Clone 8 in Table 6. In some embodiments, the variable heavy chain has a LCDR1, LCDR2, and a LCDR3 as set forth for Clone 9 in Table 6. In some embodiments, the variable heavy chain has a LCDR1, LCDR2, and a LCDR3 as set forth for Clone 10 in Table 6. In some embodiments, the variable heavy chain has a LCDR1, LCDR2, and a LCDR3 as set forth for Clone 11 in Table 6. In some embodiments, the variable heavy chain has a LCDR1, LCDR2, and a LCDR3 as set forth for Clone 12 in Table 6. In some embodiments, the variable heavy chain has a LCDR1, LCDR2, and a LCDR3 as set forth for Clone 13 in Table 6. In some embodiments, the variable heavy chain has a LCDR1, LCDR2, and a LCDR3 as set forth for Clone 14 in Table 6. In some embodiments, the variable heavy chain has a LCDR1, LCDR2, and a LCDR3 as set forth for Clone 15 in Table 6. In some embodiments, the variable heavy chain has a LCDR1, LCDR2, and a LCDR3 as set forth for Clone 16 in Table 6. In some embodiments, the variable heavy chain has a LCDR1, LCDR2, and a LCDR3 as set forth for Clone 17 in Table 6. In some embodiments, the variable heavy chain has a LCDR1, LCDR2, and a LCDR3 as set forth for Clone 1 in Table 6. In some embodiments, the variable heavy chain has a LCDR1, LCDR2, and a LCDR3 as set forth for Clone 18 in Table 6. In some embodiments, the variable heavy chain has a LCDR1, LCDR2, and a LCDR3 as set forth for Clone 19 in Table 6. In some embodiments, the variable heavy chain has a LCDR1, LCDR2, and a LCDR3 as set forth for Clone 20 in Table 6. In some embodiments, the variable heavy chain has a LCDR1, LCDR2, and a LCDR3 as set forth for Clone 21 in Table 6. In some embodiments, the variable heavy chain has a LCDR1, LCDR2, and a LCDR3 as set forth for Clone 22 in Table 6. In some embodiments, the variable heavy chain has a LCDR1, LCDR2, and a LCDR3 as set forth for Clone 23 in Table 6. In some embodiments, the variable heavy chain has a LCDR1, LCDR2, and a LCDR3 as set forth for Clone 24 in Table 6. In some embodiments, the variable heavy chain has a LCDR1, LCDR2, and a LCDR3 as set forth for Clone 25 in Table 6. In some embodiments, the variable heavy chain has a LCDR1, LCDR2, and a LCDR3 as set forth for Clone 26 in Table 6. In some embodiments, the variable heavy chain has a LCDR1, LCDR2, and a LCDR3 as set forth for Clone 27 in Table 6. In some embodiments, the variable heavy chain has a LCDR1, LCDR2, and a LCDR3 as set forth for Clone 28 in Table 6. In some embodiments, the variable heavy chain has a LCDR1, LCDR2, and a LCDR3 as set forth for Clone 29 in Table 6. In some embodiments, the variable heavy chain has a LCDR1, LCDR2, and a LCDR3 as set forth for Clone 30 in Table 6. In some embodiments, the variable heavy chain has a LCDR1, LCDR2, and a LCDR3 as set forth for Clone 31 in Table 6. In some embodiments, the variable heavy chain has a LCDR1, LCDR2, and a LCDR3 as set forth for Clone 32 in Table 6. In some embodiments, the variable heavy chain has a LCDR1, LCDR2, and a LCDR3 as set forth for Clone 33 in Table 6. In some embodiments, the variable heavy chain has a LCDR1, LCDR2, and a LCDR3 as set forth for Clone 34 in Table 6. In some embodiments, the variable heavy chain has a LCDR1, LCDR2, and a LCDR3 as set forth for Clone 35 in Table 6. In some embodiments, the variable heavy chain has a LCDR1, LCDR2, and a LCDR3 as set forth for Clone 36 in Table 6. In some embodiments, the variable heavy chain has a LCDR1, LCDR2, and a LCDR3 as set forth for Clone 37 in Table 6. In some embodiments, the variable heavy chain has a LCDR1, LCDR2, and a LCDR3 as set forth for Clone 38 in Table 6. In some embodiments, the variable heavy chain has a LCDR1, LCDR2, and a LCDR3 as set forth for Clone 39 in Table 6. In some embodiments, the variable heavy chain has a LCDR1, LCDR2, and a LCDR3 as set forth for Clone 40 in Table 6. In some embodiments, the variable heavy chain has a LCDR1, LCDR2, and a LCDR3 as set forth for Clone 41 in Table 6. In some embodiments, the variable heavy chain has a LCDR1, LCDR2, and a LCDR3 as set forth for Clone 42 in Table 6. In some embodiments, the variable heavy chain has a LCDR1, LCDR2, and a LCDR3 as set forth for Clone 43 in Table 6. In some embodiments, the variable heavy chain has a LCDR1, LCDR2, and a LCDR3 as set forth for Clone 44 in Table 6. In some embodiments, the variable heavy chain has a LCDR1, LCDR2, and a LCDR3 as set forth for Clone 45 in Table 6. In some embodiments, the variable heavy chain has a LCDR1, LCDR2, and a LCDR3 as set forth for Clone 46 in Table 6. In some embodiments, the variable heavy chain has a LCDR1, LCDR2, and a LCDR3 as set forth for Clone 47 in Table 6. In some embodiments, the variable heavy chain has a LCDR1, LCDR2, and a LCDR3 as set forth for Clone 48 in Table 6. In some embodiments, the variable heavy chain has a LCDR1, LCDR2, and a LCDR3 as set forth for Clone 49 in Table 6. In some embodiments, the variable heavy chain has a LCDR1, LCDR2, and a LCDR3 as set forth for Clone 50 in Table 6. In some embodiments, the variable heavy chain has a LCDR1, LCDR2, and a LCDR3 as set forth for Clone 51 in Table 6. In some embodiments, the variable heavy chain has a LCDR1, LCDR2, and a LCDR3 as set forth for Clone 52 in Table 6. In some embodiments, the variable heavy chain has a LCDR1, LCDR2, and a LCDR3 as set forth for Clone 53 in Table 6. In some embodiments, the variable heavy chain has a LCDR1, LCDR2, and a LCDR3 as set forth for Clone 54 in Table 6. In some embodiments, the variable heavy chain has a LCDR1, LCDR2, and a LCDR3 as set forth for Clone 55 in Table 6. In some embodiments, the variable heavy chain has a LCDR1, LCDR2, and a LCDR3 as set forth for Clone 56 in Table 6. In some embodiments, the variable heavy chain has a LCDR1, LCDR2, and a LCDR3 as set forth for Clone 57 in Table 6. In some embodiments, the variable heavy chain has a LCDR1, LCDR2, and a LCDR3 as set forth for Clone 58 in Table 6. In some embodiments, the variable heavy chain has a LCDR1, LCDR2, and a LCDR3 as set forth for Clone 59 in Table 6. In some embodiments, the variable heavy chain has a LCDR1, LCDR2, and a LCDR3 as set forth for Clone 60 in Table 6. In some embodiments, the variable heavy chain has a LCDR1, LCDR2, and a LCDR3 as set forth for Clone 61 in Table 6. In some embodiments, the variable heavy chain has a LCDR1, LCDR2, and a LCDR3 as set forth for Clone 62 in Table 6. In some embodiments, the variable heavy chain has a LCDR1, LCDR2, and a LCDR3 as set forth for Clone 63 in Table 6. In some embodiments, the variable heavy chain has a LCDR1, LCDR2, and a LCDR3 as set forth for Clone 64 in Table 6. In some embodiments, the variable heavy chain has a LCDR1, LCDR2, and a LCDR3 as set forth for Clone 65 in Table 6. In some embodiments, the variable heavy chain has a LCDR1, LCDR2, and a LCDR3 as set forth for Clone 66 in Table 6.

[0412] In some embodiments, the variable heavy chain has a LCDR1, LCDR2, and a LCDR3 as set forth for Clone 1 in Table 7. In some embodiments, the variable heavy chain has a LCDR1, LCDR2, and a LCDR3 as set forth for Clone 2 in Table 7. In some embodiments, the variable heavy chain has a LCDR1, LCDR2, and a LCDR3 as set forth for Clone 3 in Table 7. In some embodiments, the variable heavy chain has a LCDR1, LCDR2, and a LCDR3 as set forth for Clone 4 in Table 7. In some embodiments, the variable heavy chain has a LCDR1, LCDR2, and a LCDR3 as set forth for Clone 5 in Table 7. In some embodiments, the variable heavy chain has a LCDR1, LCDR2, and a LCDR3 as set forth for Clone 6 in Table 7. In some embodiments, the variable heavy chain has a LCDR1, LCDR2, and a LCDR3 as set forth for Clone 7 in Table 7. In some embodiments, the variable heavy chain has a LCDR1, LCDR2, and a LCDR3 as set forth for Clone 8 in Table 7. In some embodiments, the variable heavy chain has a LCDR1, LCDR2, and a LCDR3 as set forth for Clone 9 in Table 7. In some embodiments, the variable heavy chain has a LCDR1, LCDR2, and a LCDR3 as set forth for Clone 10 in Table 7. In some embodiments, the variable heavy chain has a LCDR1, LCDR2, and a LCDR3 as set forth for Clone 11 in Table 7. In some embodiments, the variable heavy chain has a LCDR1, LCDR2, and a LCDR3 as set forth for Clone 12 in Table 7. In some embodiments, the variable heavy chain has a LCDR1, LCDR2, and a LCDR3 as set forth for Clone 13 in Table 7. In some embodiments, the variable heavy chain has a LCDR1, LCDR2, and a LCDR3 as set forth for Clone 14 in Table 7. In some embodiments, the variable heavy chain has a LCDR1, LCDR2, and a LCDR3 as set forth for Clone 15 in Table 7. In some embodiments, the variable heavy chain has a LCDR1, LCDR2, and a LCDR3 as set forth for Clone 16 in Table 7. In some embodiments, the variable heavy chain has a LCDR1, LCDR2, and a LCDR3 as set forth for Clone 17 in Table 7. In some embodiments, the variable heavy chain has a LCDR1, LCDR2, and a LCDR3 as set forth for Clone 1 in Table 7. In some embodiments, the variable heavy chain has a LCDR1, LCDR2, and a LCDR3 as set forth for Clone 18 in Table 7. In some embodiments, the variable heavy chain has a LCDR1, LCDR2, and a LCDR3 as set forth for Clone 19 in Table 7. In some embodiments, the variable heavy chain has a LCDR1, LCDR2, and a LCDR3 as set forth for Clone 20 in Table 7. In some embodiments, the variable heavy chain has a LCDR1, LCDR2, and a LCDR3 as set forth for Clone 21 in Table 7. In some embodiments, the variable heavy chain has a LCDR1, LCDR2, and a LCDR3 as set forth for Clone 22 in Table 7. In some embodiments, the variable heavy chain has a LCDR1, LCDR2, and a LCDR3 as set forth for Clone 23 in Table 7. In some embodiments, the variable heavy chain has a LCDR1, LCDR2, and a LCDR3 as set forth for Clone 24 in Table 7. In some embodiments, the variable heavy chain has a LCDR1, LCDR2, and a LCDR3 as set forth for Clone 25 in Table 7. In some embodiments, the variable heavy chain has a LCDR1, LCDR2, and a LCDR3 as set forth for Clone 26 in Table 7. In some embodiments, the variable heavy chain has a LCDR1, LCDR2, and a LCDR3 as set forth for Clone 27 in Table 7. In some embodiments, the variable heavy chain has a LCDR1, LCDR2, and a LCDR3 as set forth for Clone 28 in Table 7. In some embodiments, the variable heavy chain has a LCDR1, LCDR2, and a LCDR3 as set forth for Clone 29 in Table 7. In some embodiments, the variable heavy chain has a LCDR1, LCDR2, and a LCDR3 as set forth for Clone 30 in Table 7. In some embodiments, the variable heavy chain has a LCDR1, LCDR2, and a LCDR3 as set forth for Clone 31 in Table 7. In some embodiments, the variable heavy chain has a LCDR1, LCDR2, and a LCDR3 as set forth for Clone 32 in Table 7. In some embodiments, the variable heavy chain has a LCDR1, LCDR2, and a LCDR3 as set forth for Clone 33 in Table 7. In some embodiments, the variable heavy chain has a LCDR1, LCDR2, and a LCDR3 as set forth for Clone 34 in Table 7. In some embodiments, the variable heavy chain has a LCDR1, LCDR2, and a LCDR3 as set forth for Clone 35 in Table 7. In some embodiments, the variable heavy chain has a LCDR1, LCDR2, and a LCDR3 as set forth for Clone 36 in Table 7. In some embodiments, the variable heavy chain has a LCDR1, LCDR2, and a LCDR3 as set forth for Clone 37 in Table 7. In some embodiments, the variable heavy chain has a LCDR1, LCDR2, and a LCDR3 as set forth for Clone 38 in Table 7. In some embodiments, the variable heavy chain has a LCDR1, LCDR2, and a LCDR3 as set forth for Clone 39 in Table 7. In some embodiments, the variable heavy chain has a LCDR1, LCDR2, and a LCDR3 as set forth for Clone 40 in Table 7. In some embodiments, the variable heavy chain has a LCDR1, LCDR2, and a LCDR3 as set forth for Clone 41 in Table 7. In some embodiments, the variable heavy chain has a LCDR1, LCDR2, and a LCDR3 as set forth for Clone 42 in Table 7. In some embodiments, the variable heavy chain has a LCDR1, LCDR2, and a LCDR3 as set forth for Clone 43 in Table 7. In some embodiments, the variable heavy chain has a LCDR1, LCDR2, and a LCDR3 as set forth for Clone 44 in Table 7. In some embodiments, the variable heavy chain has a LCDR1, LCDR2, and a LCDR3 as set forth for Clone 45 in Table 7. In some embodiments, the variable heavy chain has a LCDR1, LCDR2, and a LCDR3 as set forth for Clone 46 in Table 7. In some embodiments, the variable heavy chain has a LCDR1, LCDR2, and a LCDR3 as set forth for Clone 47 in Table 7. In some embodiments, the variable heavy chain has a LCDR1, LCDR2, and a LCDR3 as set forth for Clone 48 in Table 7. In some embodiments, the variable heavy chain has a LCDR1, LCDR2, and a LCDR3 as set forth for Clone 49 in Table 7. In some embodiments, the variable heavy chain has a LCDR1, LCDR2, and a LCDR3 as set forth for Clone 50 in Table 7. In some embodiments, the variable heavy chain has a LCDR1, LCDR2, and a LCDR3 as set forth for Clone 51 in Table 7. In some embodiments, the variable heavy chain has a LCDR1, LCDR2, and a LCDR3 as set forth for Clone 52 in Table 7. In some embodiments, the variable heavy chain has a LCDR1, LCDR2, and a LCDR3 as set forth for Clone 53 in Table 7. In some embodiments, the variable heavy chain has a LCDR1, LCDR2, and a LCDR3 as set forth for Clone 54 in Table 7. In some embodiments, the variable heavy chain has a LCDR1, LCDR2, and a LCDR3 as set forth for Clone 55 in Table 7. In some embodiments, the variable heavy chain has a LCDR1, LCDR2, and a LCDR3 as set forth for Clone 56 in Table 7. In some embodiments, the variable heavy chain has a LCDR1, LCDR2, and a LCDR3 as set forth for Clone 57 in Table 7. In some embodiments, the variable heavy chain has a LCDR1, LCDR2, and a LCDR3 as set forth for Clone 58 in Table 7. In some embodiments, the variable heavy chain has a LCDR1, LCDR2, and a LCDR3 as set forth for Clone 59 in Table 7. In some embodiments, the variable heavy chain has a LCDR1, LCDR2, and a LCDR3 as set forth for Clone 60 in Table 7. In some embodiments, the variable heavy chain has a LCDR1, LCDR2, and a LCDR3 as set forth for Clone 61 in Table 7. In some embodiments, the variable heavy chain has a LCDR1, LCDR2, and a LCDR3 as set forth for Clone 62 in Table 7. In some embodiments, the variable heavy chain has a LCDR1, LCDR2, and a LCDR3 as set forth for Clone 63 in Table 7. In some embodiments, the variable heavy chain has a LCDR1, LCDR2, and a LCDR3 as set forth for Clone 64 in Table 7. In some embodiments, the variable heavy chain has a LCDR1, LCDR2, and a LCDR3 as set forth for Clone 65 in Table 7. In some embodiments, the variable heavy chain has a LCDR1, LCDR2, and a LCDR3 as set forth for Clone 66 in Table 7. In some embodiments, the variable heavy chain has a LCDR1, LCDR2, and a LCDR3 as set forth for Clone 67 in Table 7. In some embodiments, the variable heavy chain has a LCDR1, LCDR2, and a LCDR3 as set forth for Clone 68 in Table 7. In some embodiments, the variable heavy chain has a LCDR1, LCDR2, and a LCDR3 as set forth for Clone 69 in Table 7. In some embodiments, the variable heavy chain has a LCDR1, LCDR2, and a LCDR3 as set forth for Clone 70 in Table 7. In some embodiments, the variable heavy chain has a LCDR1, LCDR2, and a LCDR3 as set forth for Clone 71 in Table 7. In some embodiments, the variable heavy chain has a LCDR1, LCDR2, and a LCDR3 as set forth for Clone 72 in Table 7. In some embodiments, the variable heavy chain has a LCDR1, LCDR2, and a LCDR3 as set forth for Clone 73 in Table 7. In some embodiments, the variable heavy chain has a LCDR1, LCDR2, and a LCDR3 as set forth for Clone 74 in Table 7. In some embodiments, the variable heavy chain has a LCDR1, LCDR2, and a LCDR3 as set forth for Clone 75 in Table 7. In some embodiments, the variable heavy chain has a LCDR1, LCDR2, and a LCDR3 as set forth for Clone 76 in Table 7. In some embodiments, the variable heavy chain has a LCDR1, LCDR2, and a LCDR3 as set forth for Clone 77 in Table 7. In some embodiments, the variable heavy chain has a LCDR1, LCDR2, and a LCDR3 as set forth for Clone 78 in Table 7. In some embodiments, the variable heavy chain has a LCDR1, LCDR2, and a LCDR3 as set forth for Clone 79 in Table 7. In some embodiments, the variable heavy chain has a LCDR1, LCDR2, and a LCDR3 as set forth for Clone 80 in Table 7. In some embodiments, the variable heavy chain has a LCDR1, LCDR2, and a LCDR3 as set forth for Clone 81 in Table 7. In some embodiments, the variable heavy chain has a LCDR1, LCDR2, and a LCDR3 as set forth for Clone 82 in Table 7. In some embodiments, the variable heavy chain has a LCDR1, LCDR2, and a LCDR3 as set forth for Clone 83 in Table 7. In some embodiments, the variable light chain has a LCDR1, LCDR2, and a LCDR3 as set forth for Clone 84 in Table 7.

[0413] In some embodiments, the variable light chain has a LCDR1, LCDR2, and a LCDR3 as set forth for MIAB128 in Table 9. In some embodiments, the variable light chain has a LCDR1, LCDR2, and a LCDR3 as set forth for MIAB128A in Table 9. In some embodiments, the variable light chain has a LCDR1, LCDR2, and a LCDR3 as set forth for MIAB129 in Table 9. In some embodiments, the variable light chain has a LCDR1, LCDR2, and a LCDR3 as set forth for MIAB130 in Table 9. In some embodiments, the variable light chain has a LCDR1, LCDR2, and a LCDR3 as set forth for MIAB131 in Table 9. In some embodiments, the variable light chain has a LCDR1, LCDR2, and a LCDR3 as set forth for MIAB132 in Table 9. In some embodiments, the variable light chain has a LCDR1, LCDR2, and a LCDR3 as set forth for MIAB133 in Table 9. In some embodiments, the variable light chain has a LCDR1, LCDR2, and a LCDR3 as set forth for MIAB134 in Table 9. In some embodiments, the variable light chain has a LCDR1, LCDR2, and a LCDR3 as set forth for MIAB135 in Table 9. In some embodiments, the variable light chain has a LCDR1, LCDR2, and a LCDR3 as set forth for MIAB136 in Table 9. In some embodiments, the variable light chain has a LCDR1, LCDR2, and a LCDR3 as set forth for MIAB137 in Table 9. In some embodiments, the variable light chain has a LCDR1, LCDR2, and a LCDR3 as set forth for MIAB138 in Table 9. In some embodiments, the variable light chain has a LCDR1, LCDR2, and a LCDR3 as set forth for MIAB139 in Table 9. In some embodiments, the variable light chain has a LCDR1, LCDR2, and a LCDR3 as set forth for MIAB140 in Table 9. In some embodiments, the variable light chain has a LCDR1, LCDR2, and a LCDR3 as set forth for MIAB141 in Table 9. In some embodiments, the variable light chain has a LCDR1, LCDR2, and a LCDR3 as set forth for MIAB142 in Table 9. In some embodiments, the variable light chain has a LCDR1, LCDR2, and a LCDR3 as set forth for MIAB143 in Table 9. In some embodiments, the variable light chain has a LCDR1, LCDR2, and a LCDR3 as set forth for MIAB144 in Table 9. In some embodiments, the variable light chain has a LCDR1, LCDR2, and a LCDR3 as set forth for MIAB145 in Table 9. In some embodiments, the variable light chain has a LCDR1, LCDR2, and a LCDR3 as set forth for MIAB146 in Table 9. In some embodiments, the variable light chain has a LCDR1, LCDR2, and a LCDR3 as set forth for MIAB147 in Table 9. In some embodiments, the variable light chain has a LCDR1, LCDR2, and a LCDR3 as set forth for MIAB148 in Table 9. In some embodiments, the variable light chain has a LCDR1, LCDR2, and a LCDR3 as set forth for MIAB149 in Table 9. In some embodiments, the variable light chain has a LCDR1, LCDR2, and a LCDR3 as set forth for MIAB150 in Table 9. In some embodiments, the variable light chain has a LCDR1, LCDR2, and a LCDR3 as set forth for MIAB151 in Table 9. In some embodiments, the variable light chain has a LCDR1, LCDR2, and a LCDR3 as set forth for MIAB152 in Table 9. In some embodiments, the variable light chain has a LCDR1, LCDR2, and a LCDR3 as set forth for MIAB153 in Table 9. In some embodiments, the variable light chain has a LCDR1, LCDR2, and a LCDR3 as set forth for MIAB154 in Table 9. In some embodiments, the variable light chain has a LCDR1, LCDR2, and a LCDR3 as set forth for MIAB155 in Table 9. In some embodiments, the variable light chain has a LCDR1, LCDR2, and a LCDR3 as set forth for MIAB156 in Table 9. In some embodiments, the variable light chain has a LCDR1, LCDR2, and a LCDR3 as set forth for MIAB157 in Table 9. In some embodiments, the variable light chain has a LCDR1, LCDR2, and a LCDR3 as set forth for MIAB158 in Table 9. In some embodiments, the variable light chain has a LCDR1, LCDR2, and a LCDR3 as set forth for MIAB159 in Table 9. In some embodiments, the variable light chain has a LCDR1, LCDR2, and a LCDR3 as set forth for MIAB160 in Table 9. In some embodiments, the variable light chain has a LCDR1, LCDR2, and a LCDR3 as set forth for MIAB161 in Table 9. In some embodiments, the variable light chain has a LCDR1, LCDR2, and a LCDR3 as set forth for MIAB162 in Table 9. In some embodiments, the variable light chain has a LCDR1, LCDR2, and a LCDR3 as set forth for MIAB163 in Table 9. In some embodiments, the variable light chain has a LCDR1, LCDR2, and a LCDR3 as set forth for MIAB164 in Table 9. In some embodiments, the variable light chain has a LCDR1, LCDR2, and a LCDR3 as set forth for MIAB165 in Table 9. In some embodiments, the variable light chain has a LCDR1, LCDR2, and a LCDR3 as set forth for MIAB166 in Table 9. In some embodiments, the variable light chain has a LCDR1, LCDR2, and a LCDR3 as set forth for MIAB167 in Table 9. In some embodiments, the variable light chain has a LCDR1, LCDR2, and a LCDR3 as set forth for MIAB168 in Table 9. In some embodiments, the variable light chain has a LCDR1, LCDR2, and a LCDR3 as set forth for MIAB169 in Table 9. In some embodiments, the variable light chain has a LCDR1, LCDR2, and a LCDR3 as set forth for MIAB170 in Table 9. In some embodiments, the variable light chain has a LCDR1, LCDR2, and a LCDR3 as set forth for MIAB171 in Table 9. In some embodiments, the variable light chain has a LCDR1, LCDR2, and a LCDR3 as set forth for MIAB172 in Table 9. In some embodiments, the variable light chain has a LCDR1, LCDR2, and a LCDR3 as set forth for MIAB173 in Table 9. In some embodiments, the variable light chain has a LCDR1, LCDR2, and a LCDR3 as set forth for MIAB174 in Table 9. In some embodiments, the variable light chain has a LCDR1, LCDR2, and a LCDR3 as set forth for MIAB175 in Table 9. In some embodiments, the variable light chain has a LCDR1, LCDR2, and a LCDR3 as set forth for MIAB176 in Table 9. In some embodiments, the variable light chain has a LCDR1, LCDR2, and a LCDR3 as set forth for MIAB177 in Table 9. In some embodiments, the variable light chain has a LCDR1, LCDR2, and a LCDR3 as set forth for MIAB178 in Table 9. In some embodiments, the variable light chain has a LCDR1, LCDR2, and a LCDR3 as set forth for MIAB179 in Table 9. In some embodiments, the variable light chain has a LCDR1, LCDR2, and a LCDR3 as set forth for MIAB180 in Table 9. In some embodiments, the variable light chain has a LCDR1, LCDR2, and a LCDR3 as set forth for MIAB181 in Table 9. In some embodiments, the variable light chain has a LCDR1, LCDR2, and a LCDR3 as set forth for MIAB182 in Table 9. In some embodiments, the variable light chain has a LCDR1, LCDR2, and a LCDR3 as set forth for MIAB183 in Table 9. In some embodiments, the variable light chain has a LCDR1, LCDR2, and a LCDR3 as set forth for MIAB184 in Table 9. In some embodiments, the variable light chain has a LCDR1, LCDR2, and a LCDR3 as set forth for MIAB185 in Table 9. In some embodiments, the variable light chain has a LCDR1, LCDR2, and a LCDR3 as set forth for MIAB186 in Table 9. In some embodiments, the variable light chain has a LCDR1, LCDR2, and a LCDR3 as set forth for MIAB187 in Table 9. In some embodiments, the variable light chain has a LCDR1, LCDR2, and a LCDR3 as set forth for MIAB188 in Table 9. In some embodiments, the variable light chain has a LCDR1, LCDR2, and a LCDR3 as set forth for MIAB189 in Table 9. In some embodiments, the variable light chain has a LCDR1, LCDR2, and a LCDR3 as set forth for MIAB190 in Table 9. In some embodiments, the variable light chain has a LCDR1, LCDR2, and a LCDR3 as set forth for MIAB191 in Table 9. In some embodiments, the variable light chain has a LCDR1, LCDR2, and a LCDR3 as set forth for MIAB192 in Table 9. In some embodiments, the variable light chain has a LCDR1, LCDR2, and a LCDR3 as set forth for MIAB193 in Table 9. In some embodiments, the variable light chain has a LCDR1, LCDR2, and a LCDR3 as set forth for MIAB194 in Table 9. In some embodiments, the variable light chain has a LCDR1, LCDR2, and a LCDR3 as set forth for MIAB195 in Table 9. In some embodiments, the variable light chain has a LCDR1, LCDR2, and a LCDR3 as set forth for MIAB196 in Table 9. In some embodiments, the variable light chain has a LCDR1, LCDR2, and a LCDR3 as set forth for MIAB197 in Table 9. In some embodiments, the variable light chain has a LCDR1, LCDR2, and a LCDR3 as set forth for MIAB198 in Table 9.

[0414] In some embodiments, the variable light chain has a LCDR1, LCDR2, and a LCDR3 as set forth for PMAB1 in Table 14. In some embodiments, the variable light chain has a LCDR1, LCDR2, and a LCDR3 as set forth for PMAB3 in Table 14. In some embodiments, the variable light chain has a LCDR1, LCDR2, and a LCDR3 as set forth for PMAB4 in Table 14. In some embodiments, the variable light chain has a LCDR1, LCDR2, and a LCDR3 as set forth for PMAB5 in Table 14. In some embodiments, the variable light chain has a LCDR1, LCDR2, and a LCDR3 as set forth for PMAB6 in Table 14. In some embodiments, the variable light chain has a LCDR1, LCDR2, and a LCDR3 as set forth for PMAB7 in Table 14. In some embodiments, the variable light chain has a LCDR1, LCDR2, and a LCDR3 as set forth for PMAB8 in Table 14. In some embodiments, the variable light chain has a LCDR1, LCDR2, and a LCDR3 as set forth for PMAB9 in Table 14. In some embodiments, the variable light chain has a LCDR1, LCDR2, and a LCDR3 as set forth for PMAB1 in Table 14. In some embodiments, the variable light chain has a LCDR1, LCDR2, and a LCDR3 as set forth for PMAB10 in Table 14. In some embodiments, the variable light chain has a LCDR1, LCDR2, and a LCDR3 as set forth for PMAB11 in Table 14. In some embodiments, the variable light chain has a LCDR1, LCDR2, and a LCDR3 as set forth for PMAB12 in Table 14. In some embodiments, the variable light chain has a LCDR1, LCDR2, and a LCDR3 as set forth for PMAB13 in Table 14. In some embodiments, the variable light chain has a LCDR1, LCDR2, and a LCDR3 as set forth for PMAB14 in Table 14. In some embodiments, the variable light chain has a LCDR1, LCDR2, and a LCDR3 as set forth for PMAB15 in Table 14. In some embodiments, the variable light chain has a LCDR1, LCDR2, and a LCDR3 as set forth for PMAB16 in Table 14. In some embodiments, the variable light chain has a LCDR1, LCDR2, and a LCDR3 as set forth for PMAB1 in Table 14. In some embodiments, the variable light chain has a LCDR1, LCDR2, and a LCDR3 as set forth for PMAB19 in Table 14. In some embodiments, the variable light chain has a LCDR1, LCDR2, and a LCDR3 as set forth for PMAB20 in Table 14. In some embodiments, the variable light chain has a LCDR1, LCDR2, and a LCDR3 as set forth for PMAB21 in Table 14. In some embodiments, the variable light chain has a LCDR1, LCDR2, and a LCDR3 as set forth for PMAB22 in Table 14. In some embodiments, the variable light chain has a LCDR1, LCDR2, and a LCDR3 as set forth for PMAB23 in Table 14. In some embodiments, the variable light chain has a LCDR1, LCDR2, and a LCDR3 as set forth for PMAB24 in Table 14. In some embodiments, the variable light chain has a LCDR1, LCDR2, and a LCDR3 as set forth for PMAB25 in Table 14. In some embodiments, the variable light chain has a LCDR1, LCDR2, and a LCDR3 as set forth for PMAB26 in Table 14. In some embodiments, the variable light chain has a LCDR1, LCDR2, and a LCDR3 as set forth for PMAB27 in Table 14. In some embodiments, the variable light chain has a LCDR1, LCDR2, and a LCDR3 as set forth for PMAB28 in Table 14. In some embodiments, the variable light chain has a LCDR1, LCDR2, and a LCDR3 as set forth for PMAB29 in Table 14. In some embodiments, the variable light chain has a LCDR1, LCDR2, and a LCDR3 as set forth for PMAB30 in Table 14. In some embodiments, the variable light chain has a LCDR1, LCDR2, and a LCDR3 as set forth for PMAB31 in Table 14. In some embodiments, the variable light chain has a LCDR1, LCDR2, and a LCDR3 as set forth for PMAB32 in Table 14. In some embodiments, the variable heavy chain has a HCDR1, HCDR2, and a HCDR33 as set forth for PMAB33 in Table 14. In some embodiments, the variable light chain has a LCDR1, LCDR2, and a LCDR3 as set forth for PMAB34 in Table 14. In some embodiments, the variable light chain has a LCDR1, LCDR2, and a LCDR3 as set forth for PMAB35 in Table 14. In some embodiments, the variable light chain has a LCDR1, LCDR2, and a LCDR3 as set forth for PMAB36 in Table 14. In some embodiments, the variable light chain has a LCDR1, LCDR2, and a LCDR3 as set forth for PMAB37 in Table 14. In some embodiments, the variable light chain has a LCDR1, LCDR2, and a LCDR3 as set forth for PMAB38 in Table 14. In some embodiments, the variable light chain has a LCDR1, LCDR2, and a LCDR3 as set forth for PMAB39 in Table 14. In some embodiments, the variable light chain has a LCDR1, LCDR2, and a LCDR3 as set forth for PMAB40 in Table 14. In some embodiments, the variable light chain has a LCDR1, LCDR2, and a LCDR3 as set forth for PMAB41 in Table 14. In some embodiments, the variable light chain has a LCDR1, LCDR2, and a LCDR3 as set forth for PMAB42 in Table 14. In some embodiments, the variable light chain has a LCDR1, LCDR2, and a LCDR3 as set forth for PMAB43 in Table 14. In some embodiments, the variable light chain has a LCDR1, LCDR2, and a LCDR3 as set forth for PMAB44 in Table 14. In some embodiments, the variable light chain has a LCDR1, LCDR2, and a LCDR3 as set forth for PMAB45 in Table 14. In some embodiments, the variable light chain has a LCDR1, LCDR2, and a LCDR3 as set forth for PMAB46 in Table 14. In some embodiments, the variable light chain has a LCDR1, LCDR2, and a LCDR3 as set forth for PMAB47 in Table 14. In some embodiments, the variable light chain has a LCDR1, LCDR2, and a LCDR3 as set forth for PMAB48 in Table 14. In some embodiments, the variable light chain has a LCDR1, LCDR2, and a LCDR3 as set forth for PMAB49 in Table 14. In some embodiments, the variable light chain has a LCDR1, LCDR2, and a LCDR3 as set forth for PMAB50 in Table 14. In some embodiments, the variable light chain has a LCDR1, LCDR2, and a LCDR3 as set forth for PMAB51 in Table 14. In some embodiments, the variable light chain has a LCDR1, LCDR2, and a LCDR3 as set forth for PMAB52 in Table 14. In some embodiments, the variable light chain has a LCDR1, LCDR2, and a LCDR3 as set forth for PMAB53 in Table 14. In some embodiments, the variable light chain has a LCDR1, LCDR2, and a LCDR3 as set forth for PMAB55 in Table 14.

[0415] In some embodiments, the variable light chain has a LCDR1, LCDR2, and a LCDR3 as set forth for MIAB212 in Table 15. In some embodiments, the variable light chain has a LCDR1, LCDR2, and a LCDR3 as set forth for MIAB213 in Table 15. In some embodiments, the variable light chain has a LCDR1, LCDR2, and a LCDR3 as set forth for MIAB214 in Table 15.

[0416] In some embodiments, the CDRS are swapped for one another. For example, the HCDR1 of clone 1 can be substituted for the HCDR1 of clone 10, or vice versa. This CDR swapping can be done for any of the HCDRs of the clones provided herein (e.g., HCDR1 for HCDR1; HCDR2 for HCDR2; or HCDR3 for HCDR3) or the LCDRs (e.g., LCDR1 for LCDR1; LCDR2 for LCDR2; or LCDR3 for LCDR3). Therefore, in some embodiments, the antibody comprises a HCDR1 as set forth in any of Clones 1-66 of Table 6, Clones 1-84 of Table 7, MIAB128-198 of Table 9, PMAB1-55 of Table 14, or PMAB212-214 of Table 15; a HCDR2 as set forth in any of Clones 1-66 of Table 6, Clones 1-84 of Table 7, MIAB128-198 of Table 9, PMAB1-55 of Table 14, or PMAB212-214 of Table 15; a HCDR3 as set forth in any of Clones 1-66 of Table 6, Clones 1-84 of Table 7, MIAB128-198 of Table 9, PMAB1-55 of Table 14, or PMAB212-214 of Table 15; a LCDR1 as set forth in any of Clones 1-66 of Table 6, Clones 1-84 of Table 7, MIAB128-198 of Table 9, PMAB1-55 of Table 14, or PMAB212-214 of Table 15; a LCDR2 as set forth in any of Clones 1-66 of Table 6, Clones 1-84 of Table 7, MIAB128-198 of Table 9, PMAB1-55 of Table 14, or PMAB212-214 of Table 15; a LCDR3 as set forth in any of Clones 1-66 of Table 6, Clones 1-84 of Table 7, MIAB128-198 of Table 9, PMAB1-55 of Table 14, or PMAB212-214 of Table 15, or a variant of any of the foregoing.

[0417] In some embodiments, the MadCAM Antibody is a scFV format as shown in clones 6, 59, 63, MIAB199, MIAB200, MIAB201, MIAB202, MIAB203, MIAB204, or PMAB1-55. The linker as shown in those sequences is 20 amino acid residues in length, but could also be 5, 10, or 15 amino acid residues in length. In some embodiments, the linker the links the VH and VL (or VK) sequences of the antibody is a glycine/serine linker, which can be a sequence of GGGGSGGGGSGGGGSGGGGS (SEQ ID NO: 22) or GGGGSGGGGSGGGGS (SEQ ID NO: 30). This is simply a non-limiting example and the linker can have varying number of GGGGS (SEQ ID NO: 23) or GGGGA (SEQ ID NO: 29) repeats. In some embodiments, the linker comprises 1, 2, 3, 4, 5, 6, 7, 8, 9, or 10 of the GGGGS (SEQ ID NO: 23) or GGGGA (SEQ ID NO: 29) repeats (repeats disclosed as SEQ ID NOS 1550-1551, respectively). Thus, the linkers shown in Table 6 are non-limiting examples and can be substituted with any other linkers, such as those provided for herein.

[0418] In some embodiments, the polypeptide comprises the formula of:

(SEQ ID NOS 1552-1553, respectively)
APTSSSTKKTQLQLEHLLLDLQMILNGINNYKNPKLTRMLTFKFYMPKKA
TELKHLQCLEEELKPLEEALNLAPSKNFHLRPRDLISDINVIVLELKGSE
TTFMCEYADETATIVEFINRWITFSQSIISTLT-Linker1-
DKTHTCPPCPAPEAAGAPSVFLFPPKPKDTLMISRTPEVTCVVVDVSHED
PEVKFNWYVDGVEVHNAKTKPREEQYNSTYRVVSVLIVLHQDWLNGKEYK
CKVSNKALPAPIEKTISKAKGQPREPQVYTLPPSREEMTKNQVSLTCLVK
GFYPSDIAVEWESNGQPENNYKTTPPVLDSDGSFFLYSKLTVDKSRWQQG
NVFSCSVMHEALHNHYTQKSLSLSPG-Linker2-Ab,

wherein Linker 1, Linker2, and Ab are as provided herein. In some embodiments, Linker 1 is GGGGSGGGGSGGGGS (SEQ ID NO: 30) or GGGGSGGGGSGGGGSGGGGS (SEQ ID NO: 22). In some embodiments, Linker 2 is GGGGS (SEQ ID NO: 23). In some embodiments, Linker 2 is GGGGSGGGGS (SEQ ID NO: 619). In some embodiments, Linker 2 is GGGGSGGGGSGGGGS (SEQ ID NO: 30). In some embodiments, Ab is the scFV as set forth in Table 6, Table 12, or Table 14. In some embodiments, the Ab comprises a sequence of SEQ ID NO: 95. In some embodiments, the Ab comprises a sequence of SEQ ID NO: 364. In some embodiments, the Ab comprises a sequence of SEQ ID NO: 386. In some embodiments, the Ab comprises a sequences of SEQ ID NOs: 41, 22, 1437, 30, 591, 22, and 592. In some embodiments, the Ab comprises a VH and a VK or VL segment. In some embodiments, the VH comprises a sequence as set forth in Table 7, Table 9, Table 10, Table 12, or Table 14. In some embodiments, the VK comprises a sequence as set forth in Table 7, Table 9, Table 10, Table 12, or Table 14. In some embodiments, the Ab comprises a VH and a VK as set forth for the clones in Table 7, Table 9, Table 10, Table 12, or Table 14. In some embodiments, the VH and VK are linked by a linker. In some embodiments, the VH and VK are linked by a peptide linker comprising a peptide of GGGGSGGGGSGGGGSGGGGS (SEQ ID NO: 22). In some embodiments, the VH and VK are linked by a peptide linker comprising a peptide of GGGGS (SEQ ID NO: 23). In some embodiments, the VH and VK are linked by a peptide linker comprising a peptide of GGGGSGGGGS (SEQ ID NO: 619). In some embodiments, the VH and VK are linked by a peptide linker comprising a peptide of GGGGSGGGGSGGGGS (SEQ ID NO: 30).

[0419] In some embodiments, the Ab comprises a VH of SEQ ID NO: 414 and a VK of SEQ ID NO: 415. In some embodiments, the Ab comprises a VH of SEQ ID NO: 591 and a VK of SEQ ID NO: 592. In some embodiments, the Ab comprises a VH of SEQ ID NO: 599 and a VK of SEQ ID NO: 600. In some embodiments, the Ab comprises a VH of SEQ ID NO: 1387 and a VK of SEQ ID NO: 1363.

[0420] In some embodiments, the peptide comprises:

(SEQ ID NO: 1554)
APTSSSTKKTQLQLEHLLLDLQMILNGINNYKNPKLTRMLTFKFYMPKKA
TELKHLQCLEEELKPLEEALNLAPSKNFHLRPRDLISDINVIVLELKGSE
TTFMCEYADETATIVEFINRWITFSQSIISTLT-(GGGGSGGGGSGGGGS
or
GGGGSGGGGSGGGGSGGGGS)-
DKTHTCPPCPAPEAAGAPSVFLFPPKPKDTLMISRTPEVTCVVVDVSHED
PEVKFNWYVDGVEVHNAKTKPREEQYNSTYRVVSVLTVLHQDWLNGKEYK
CKVSNKALPAPIEKTISKAKGQPREPQVYTLPPSREEMTKNQVSLTCLVK
GFYPSDIAVEWESNGQPENNYKTTPPVLDSDGSFFLYSKLTVDKSRWQQG
NVFSCSVMHEALHNHYTQKSLSLSPG-(GGGGS
or
GGGGSGGGGS
or
GGGGSGGGGSGGGGS)-Ab,

wherein Ab is set forth as herein. In some embodiments, the Ab comprises a sequence of SEQ ID NO: 95. In some embodiments, the Ab comprises a sequence of SEQ ID NO: 364. In some embodiments, the Ab comprises a sequence of SEQ ID NO: 386. In some embodiments, the Ab comprises a VH and a VK or VL segment. In some embodiments, the VH comprises a sequence as set forth in Table 7, Table 9, Table 10, Table 12, or Table 14. In some embodiments, the VK comprises a sequence as set forth in Table 7, Table 9, Table 10, Table 12, or Table 14. In some embodiments, the Ab comprises a VH and a VK as set forth for the clones in Table 7, Table 9, Table 10, Table 12, or Table 14. In some embodiments, the VH and VK are linked by a linker. In some embodiments, the VH and VK are linked by a peptide linker comprising a peptide of GGGGSGGGGSGGGGSGGGGS (SEQ ID NO: 22). In some embodiments, the VH and VK are linked by a peptide linker comprising a peptide of GGGGS (SEQ ID NO: 23). In some embodiments, the VH and VK are linked by a peptide linker comprising a peptide of GGGGSGGGGS (SEQ ID NO: 619).

[0421] In some embodiments, the Ab comprises a VH of SEQ ID NO: 414 and a VK of SEQ ID NO: 415. In some embodiments, the Ab comprises a VH of SEQ ID NO: 591 and a VK of SEQ ID NO: 592. In some embodiments, the Ab comprises a VH of SEQ ID NO: 599 and a VK of SEQ ID NO: 600. In some embodiments, the Ab comprises a VH of SEQ ID NO: 1387 and a VK of SEQ ID NO: 1363. These examples are non-limiting the combinations of VH and VK as shown in Table 7, Table 9, Table 10, Table 12, or Table 14 are also provided.

[0422] In some embodiments, the therapeutic compound or polypeptide comprises a formula of an anti-PD-1 heavy and light chain, wherein the PD-1 heavy chain is linked to a MAdCAM antibody (scFV), such as those provided herein at the C-terminus of the PD-1 IgG heavy chain. The polypeptide can have the formula of A1-A2-Linker1-A4-Linker2-A5 and A6, wherein A1 is a PD-1 heavy chain, A6 is a PD-1 light chain; A2 is a IgG constant domain (e.g. IgG1 Constant domain), Linker 1 is as provided herein, such as, but not limited to, a glycine/serine linker, which can be a sequence of GGGGSGGGGSGGGGSGGGGS (SEQ ID NO: 22) or GGGGSGGGGSGGGGS (SEQ ID NO: 30), or GGGSEGGGSEGGGSE (SEQ ID NO: 1546) which are simply a non-limiting example and the linker can have varying number of GGGGS (SEQ ID NO: 23) or GGGGA (SEQ ID NO: 29) repeats, and in some embodiments, the linker comprises 1, 2, 3, 4, 5, 6, 7, 8, 9, or 10 of the GGGGS (SEQ ID NO: 23) or GGGGA (SEQ ID NO: 29) repeats (repeats disclosed as SEQ ID NOS 1550-1551, respectively); A4 is VH domain, such as those set forth in Table 7; Linker 2 is as provided herein, such as, but not limited to, a glycine/serine linker, which can be a sequence of GGGGSGGGGSGGGGSGGGGS (SEQ ID NO: 22) or GGGGSGGGGSGGGGS (SEQ ID NO: 30), which are simply a non-limiting example and the linker can have varying number of GGGGS (SEQ ID NO: 23) or GGGGA (SEQ ID NO: 29) repeats, and in some embodiments, the linker comprises 1, 2, 3, 4, 5, 6, 7, 8, 9, or 10 of the GGGGS (SEQ ID NO: 23) or GGGGA repeats (SEQ ID NO: 29) repeats (repeats disclosed as SEQ ID NOS 1550-1551, respectively); and A5 is VK/VL domain, such as those set forth in Table 7. In some embodiments, Linker 2 is GGGGSGGGGSGGGGS (SEQ ID NO: 30). In some embodiments, the A4-Linker2-A5 is a scFV antibody, such as those set forth in Table 6. The linkers shown in Table 6 can be substituted with the linker of GGGGSGGGGSGGGGS (SEQ ID NO: 30). In some embodiments, the A4-Linker2-A5 comprises the HCDR sets (e.g., HCDR1, HCDR2, HCDR3, LCDR1, LCDR2, and LCDR3) sets as set forth in Table 6 or Table 7. For the avoidance of doubt, a CDR set refers to the CDRs illustrated for each of the different antibody clones provided for in the tables. In some embodiments, A4 comprises a peptide of SEQ ID NO: 414 and A5 comprises a peptide of SEQ ID NO: 415. In some embodiments, A4 comprises a peptide of SEQ ID NO: 591 and A5 comprises a peptide of SEQ ID NO: 592. In some embodiments, A4 comprises a peptide of SEQ ID NO: 599 and A5 comprises a peptide of SEQ ID NO: 600. These examples are non-limiting the combinations of VH and VK as shown in Table 7, Table 12, or Table 14 are also provided.

[0423] In some embodiments, A2 comprises a sequence of

(SEQ ID NO: 44)
ASTKGPSVFPLAPSSKSTSGGTAALGCLVKDYFPEPVTVSWNSGALTSGV
HTFPAVLQSSGLYSLSSVVTVPSSSLGTQTYICNVNHKPSNTKVDKKVEP
KSCDKTHTCPPCPAPEAAGAPSVFLFPPKPKDTLMISRTPEVTCVVVDVS
HEDPEVKFNWYVDGVEVHNAKTKPREEQYNSTYRVVSVLTVLHQDWLNGK
EYKCKVSNKALPAPIEKTISKAKGQPREPQVYTLPPSREEMTKNQVSLTC
LVKGFYPSDIAVEWESNGQPENNYKTTPPVLDSDGSFFLYSKLTVDKSRW
QQGNVFSCSVMHEALHNHYTQKSLSLSPG.

[0424] In some embodiments, once expressed the heavy and light chains of the PD-1 antibody bind to one another to form the compound comprising the anti-PD-1 antibody linked to the anti-MAdCAM antibody. The anti-MAdCAM antibody can be any antibody that binds to MAdCAM, such as those provided for herein.

[0425] In some embodiments, the therapeutic compound comprises one or more sequences selected from the sequence in the following table

TABLE 12

| | | | Fc- | | | | | |
|---|---|---|---|---|---|---|---|---|
| | | | scFv | | Intra | | | |
| | | IgG1 Constant | Linker | scFv | scFv | ScFv | Fab | |
| Ab | Fab VH Seq | Domain Seq | Seq | VH Seq | Linker | VK Seq | VL | CK |
| PMAB | EVQLLE | ASTKGPSVFPLAP | GGGGSG | EVQLLE | GGGGSG | DIQMT | DIVMT | RTVAA |
| 1 | SGGGLV | SSKSTSGGTAALG | GGGSGG | SGGGLV | GGGSGG | QSPSS | QSPDS | PSVFI |
| | QPGGSL | CLVKDYFPEPVTV | GGS | QPGGSL | GGSGGG | LSASV | LAVSL | FPPSD |
| | RLSCAA | SWNSGALTSGVHT | (SEQ | RLSCAA | GS | GDRVT | GERAT | EQLKS |
| | SGFTFS | FPAVLQSSGLYSL | ID NO: | SGFTFS | (SEQ | ITCRA | INCKS | GTASV |
| | NSDMSW | SSVVTVPSSSLGT | 30) | DFWMHW | ID NO: | SQSVS | SQSVL | VCLLN |
| | VRQAPG | QTYICNVNHKPSN | | VRQAPG | 22) | RSLAW | YSPNN | NFYPR |
| | KGLEWV | TKVDKKVEPKSCD | | KGLEWI | | YQQKP | KNYLA | EAKVQ |
| | SGITIS | KTHTCPPCPAPEA | | SYISGD | | GKAPK | WYQQK | WKVDN |
| | GGSTYY | AGAPSVFLFPPKP | | SGYTNY | | LLIYA | PGQPP | ALQSG |
| | ADSVKG | KDTLMISRTPEVT | | ADSVKG | | ASSLQ | KLLIY | NSQES |
| | RFTISR | CVVVDVSHEDPEV | | RFTISR | | SGVPS | WASTR | VTEQD |
| | DNSKNT | KFNWYVDGVEVHN | | DNSKNT | | RFSGS | ESGVP | SKDST |
| | LYLQMN | AKTKPREEQYNST | | LYLQMN | | GSGTD | DRFSG | YSLSS |
| | SLRAED | YRVVSVLTVLHQD | | SLRAED | | FTLTI | SGSGT | TLTLS |
| | TAVYYC | WLNGKEYKCKVSN | | TAVYYC | | SSLQP | DFTLT | KADYE |
| | ARGRGG | KALPAPIEKTISK | | ARDRPY | | EDFAT | ISSLQ | KHKVY |
| | SGWLDY | AKGQPREPQVYTL | | YYYMDV | | YYCQQ | AEDVA | ACEVT |
| | WGQGTL | PPSREEMTKNQVS | | WGKGTT | | YKSYP | VYYCQ | HQGLS |
| | VTVSS | LTCLVKGFYPSDI | | VTVSS | | VTFGQ | QYYTT | SPVTK |
| | (SEQ | AVEWESNGQPENN | | (SEQ | | GTKVE | PPTFG | SFNRG |
| | ID NO: | YKTTPPVLDSDGS | | ID NO: | | IK | QGTRL | EC |
| | 1438) | FFLYSKLTVDKSR | | 591) | | (SEQ | EIK | (SEQ |
| | | WQQGNVFSCSVMH | | | | ID | (SEQ | ID |
| | | EALHNHYTQKSLS | | | | NO: | ID | NO: |
| | | LSPG (SEQ ID | | | | 592) | NO: | 45) |
| | | NO: 44) | | | | | 1359) | |
| PMAB | EVQLLE | ASTKGPSVFPLAP | GGGGSG | EVQLLE | GGGGSG | DIQMT | DIVMT | RTVAA |
| 2 | SGGGLV | SSKSTSGGTAALG | GGGSGG | SGGGLV | GGGSGG | QSPSS | QSPDS | PSVFI |
| | QPGGSL | CLVKDYFPEPVTV | GGS | QPGGSL | GGSGGG | LSASV | LAVSL | FPPSD |
| | RLSCAA | SWNSGALTSGVHT | (SEQ | RLSCAA | GS | GDRVT | GERAT | EQLKS |
| | SGFTFS | FPAVLQSSGLYSL | ID NO: | SGFTFS | (SEQ | ITCRA | INCKS | GTASV |
| | NSDMSW | SSVVTVPSSSLGT | 30) | SYWMHW | ID NO: | SQSIS | SQSVL | VCLLN |
| | VRQAPG | QTYICNVNHKPSN | | VRQAPG | 22) | SSLAW | YSPNN | NFYPR |
| | KGLEWV | TKVDKKVEPKSCD | | KGLEWV | | YQQKP | KNYLA | EAKVQ |
| | SGITIS | KTHTCPPCPAPEA | | SAISGS | | GKAPK | WYQQK | WKVDN |
| | GGSTYY | AGAPSVFLFPPKP | | SGSTYY | | LLIYA | PGQPP | ALQSG |
| | ADSVKG | KDTLMISRTPEVT | | ADSVKG | | ASSLQ | KLLIY | NSQES |
| | RFTISR | CVVVDVSHEDPEV | | RFTISR | | SGVPS | WASTR | VTEQD |
| | DNSKNT | KFNWYVDGVEVHN | | DNSKNT | | RFSGS | ESGVP | SKDST |
| | LYLQMN | AKTKPREEQYNST | | LYLQMN | | GSGTD | DRFSG | YSLSS |
| | SLRAED | YRVVSVLTVLHQD | | SLRAED | | FTLTI | SGSGT | TLTLS |
| | TAVYYC | WLNGKEYKCKVSN | | TAVYYC | | SSLQP | DFTLT | KADYE |
| | ARGRGG | KALPAPIEKTISK | | ARDRPY | | EDFAT | ISSLQ | KHKVY |
| | SGWLDY | AKGQPREPQVYTL | | GYYMDV | | YYCQQ | AEDVA | ACEVT |
| | WGQGTL | PPSREEMTKNQVS | | WGKGTT | | YKSYP | VYYCQ | HQGLS |
| | VTVSS | LTCLVKGFYPSDI | | VTVSS | | VTFGQ | QYYTT | SPVTK |
| | (SEQ | AVEWESNGQPENN | | (SEQ | | GTKVE | PPTFG | SFNRG |
| | ID NO: | YKTTPPVLDSDGS | | ID NO: | | IK | QGTRL | EC |
| | 1438) | FFLYSKLTVDKSR | | 1347) | | (SEQ | EIK | (SEQ |
| | | WQQGNVFSCSVMH | | | | ID | (SEQ | ID |
| | | EALHNHYTQKSLS | | | | NO: | ID | NO: |
| | | LSPG (SEQ ID | | | | 1367) | NO: | 45) |
| | | NO: 44) | | | | | 1359) | |
| PMAB | EVQLLE | ASTKGPSVFPLAP | GGGGSG | EVQLLE | GGGGSG | DIQMT | DIVMT | RTVAA |
| 3 | SGGGLV | SSKSTSGGTAALG | GGGSGG | SGGGLV | GGGSGG | QSPSS | QSPDS | PSVFI |
| | QPGGSL | CLVKDYFPEPVTV | GGS | QPGGSL | GGSGGG | LSASV | LAVSL | FPPSD |
| | RLSCAA | SWNSGALTSGVHT | (SEQ | RLSCAA | GS | GDRVT | GERAT | EQLKS |
| | SGFTFS | FPAVLQSSGLYSL | ID NO: | SGFTFS | (SEQ | ITCRA | INCKS | GTASV |
| | NSDMSW | SSVVTVPSSSLGT | 30) | SYWMHW | ID NO: | SQSIS | SQSVL | VCLLN |
| | VRQAPG | QTYICNVNHKPSN | | VRQAPG | 22) | SSLAW | YSPNN | NFYPR |
| | KGLEWV | TKVDKKVEPKSCD | | KGLEWV | | YQQKP | KNYLA | EAKVQ |
| | SGITIS | KTHTCPPCPAPEA | | SAISGS | | GKAPK | WYQQK | WKVDN |
| | GGSTYY | AGAPSVFLFPPKP | | SGSTYY | | LLIYA | PGQPP | ALQSG |
| | ADSVKG | KDTLMISRTPEVT | | ADSVKG | | ASSLQ | KLLIY | NSQES |
| | RFTISR | CVVVDVSHEDPEV | | RFTISR | | SGVPS | WASTR | VTEQD |
| | DNSKNT | KFNWYVDGVEVHN | | DNSKNT | | RFSGS | ESGVP | SKDST |
| | LYLQMN | AKTKPREEQYNST | | LYLQMN | | GSGTD | DRFSG | YSLSS |
| | SLRAED | YRVVSVLTVLHQD | | SLRAED | | FTLTI | SGSGT | TLTLS |
| | TAVYYC | WLNGKEYKCKVSN | | TAVYYC | | SSLQP | DFTLT | KADYE |
| | ARGRGG | KALPAPIEKTISK | | ARDRPY | | EDFAT | ISSLQ | KHKVY |
| | SGWLDY | AKGQPREPQVYTL | | YYYMDV | | YYCQQ | AEDVA | ACEVT |
| | WGQGTL | PPSREEMTKNQVS | | WGKGTT | | YKSYP | VYYCQ | HQGLS |
| | VTVSS | LTCLVKGFYPSDI | | VTVSS | | VTFGQ | QYYTT | SPVTK |
| | (SEQ | AVEWESNGQPENN | | (SEQ | | GTKVE | PPTFG | SFNRG |
| | ID NO: | YKTTPPVLDSDGS | | ID NO: | | IK | QGTRL | EC |
| | 1438) | FFLYSKLTVDKSR | | 1439) | | (SEQ | EIK | (SEQ |
| | | WQQGNVFSCSVMH | | | | ID | (SEQ | ID |
| | | EALHNHYTQKSLS | | | | NO: | ID | NO: |
| | | LSPG (SEQ ID | | | | 1367) | NO: | 45) |
| | | NO: 44) | | | | | 1359) | |
| PMAB | EVQLLE | ASTKGPSVFPLAP | GGGGSG | EVQLLE | GGGGSG | DIQMT | DIVMT | RTVAA |
| 4 | SGGGLV | SSKSTSGGTAALG | GGGSGG | SGGGLV | GGGSGG | QSPSS | QSPDS | PSVFI |
| | QPGGSL | CLVKDYFPEPVTV | GGS | QPGGSL | GGSGGG | LSASV | LAVSL | FPPSD |
| | RLSCAA | SWNSGALTSGVHT | (SEQ | RLSCAA | GS | GDRVT | GERAT | EQLKS |
| | SGFTFS | FPAVLQSSGLYSL | ID NO: | SGFTFS | (SEQ | ITCRA | INCKS | GTASV |
| | NSDMSW | SSVVTVPSSSLGT | 30) | SYWMHW | ID NO: | SQSIS | SQSVL | VCLLN |
| | VRQAPG | QTYICNVNHKPSN | | VRQAPG | 22) | RSLAW | YSPNN | NFYPR |
| | KGLEWV | TKVDKKVEPKSCD | | KGLEWV | | YQQKP | KNYLA | EAKVQ |
| | SGITIS | KTHTCPPCPAPEA | | SAISGS | | GKAPK | WYQQK | WKVDN |
| | GGSTYY | AGAPSVFLFPPKP | | SGSTYY | | LLIYA | PGQPP | ALQSG |
| | ADSVKG | KDTLMISRTPEVT | | ADSVKG | | ASSLQ | KLLIY | NSQES |
| | RFTISR | CVVVDVSHEDPEV | | RFTISR | | SGVPS | WASTR | VTEQD |
| | DNSKNT | KFNWYVDGVEVHN | | DNSKNT | | RFSGS | ESGVP | SKDST |
| | LYLQMN | AKTKPREEQYNST | | LYLQMN | | GSGTD | DRFSG | YSLSS |
| | SLRAED | YRVVSVLTVLHQD | | SLRAED | | FTLTI | SGSGT | TLTLS |
| | TAVYYC | WLNGKEYKCKVSN | | TAVYYC | | SSLQP | DFTLT | KADYE |
| | ARGRGG | KALPAPIEKTISK | | ARDRPY | | EDFAT | ISSLQ | KHKVY |
| | SGWLDY | AKGQPREPQVYTL | | GYYMDV | | YYCQQ | AEDVA | ACEVT |
| | WGQGTL | PPSREEMTKNQVS | | WGKGTT | | YKSYP | VYYCQ | HQGLS |
| | VTVSS | LTCLVKGFYPSDI | | VTVSS | | VTFGQ | QYYTT | SPVTK |
| | (SEQ | AVEWESNGQPENN | | (SEQ | | GTKVE | PPTFG | SFNRG |
| | ID NO: | YKTTPPVLDSDGS | | ID NO: | | IK | QGTRL | EC |
| | 1438) | FFLYSKLTVDKSR | | 1347) | | (SEQ | EIK | (SEQ |
| | | WQQGNVFSCSVMH | | | | ID | (SEQ | ID |
| | | EALHNHYTQKSLS | | | | NO: | ID | NO: |
| | | LSPG (SEQ ID | | | | 1363) | NO: | 45) |
| | | NO: 44) | | | | | 1359) | |
| PMAB | EVQLLE | ASTKGPSVFPLAP | GGGGSG | EVQLLE | GGGGSG | DIQMT | DIVMT | RTVAA |
| 5 | SGGGLV | SSKSTSGGTAALG | GGGSGG | SGGGLV | | QSPSS | QSPDS | PSVFI |
| | QPGGSL | CLVKDYFPEPVTV | GGS | QPGGSL | GGGSGG | LSASV | LAVSL | FPPSD |
| | RLSCAA | SWNSGALTSGVHT | (SEQ | RLSCAA | GGSGGG | GDRVT | GERAT | EQLKS |
| | SGFTFS | FPAVLQSSGLYSL | ID NO: | SGFTFS | GS | ITCRA | INCKS | GTASV |
| | NSDMSW | SSVVTVPSSSLGT | 30) | SYWMHW | (SEQ | SQSIS | SQSVL | VCLLN |
| | VRQAPG | QTYICNVNHKPSN | | VRQAPG | ID NO: | RSLAW | YSPNN | NFYPR |
| | KGLEWV | TKVDKKVEPKSCD | | KGLEWV | 22) | YQQKP | KNYLA | EAKVQ |
| | SGITIS | KTHTCPPCPAPEA | | SAISGS | | GKAPK | WYQQK | WKVDN |
| | GGSTYY | AGAPSVFLFPPKP | | SGSTYY | | LLIYA | PGQPP | ALQSG |
| | ADSVKG | KDTLMISRTPEVT | | ADSVKG | | ASSLQ | KLLIY | NSQES |
| | RFTISR | CVVVDVSHEDPEV | | RFTISR | | SGVPS | WASTR | VTEQD |
| | DNSKNT | KFNWYVDGVEVHN | | DNSKNT | | RFSGS | ESGVP | SKDST |
| | LYLQMN | AKTKPREEQYNST | | LYLQMN | | GSGTD | DRFSG | YSLSS |
| | SLRAED | YRVVSVLTVLHQD | | SLRAED | | FTLTI | SGSGT | TLTLS |
| | TAVYYC | WLNGKEYKCKVSN | | TAVYYC | | SSLQP | DFTLT | KADYE |
| | ARGRGG | KALPAPIEKTISK | | ARDRPY | | EDFAT | ISSLQ | KHKVY |
| | SGWLDY | AKGQPREPQVYTL | | YYYMDV | | YYCQQ | AEDVA | ACEVT |
| | WGQGTL | PPSREEMTKNQVS | | WGKGTT | | YKSYP | VYYCQ | HQGLS |
| | VTVSS | LTCLVKGFYPSDI | | VTVSS | | VTFGQ | QYYTT | SPVTK |
| | (SEQ | AVEWESNGQPENN | | (SEQ | | GTKVE | PPTFG | SFNRG |
| | ID NO: | YKTTPPVLDSDGS | | ID NO: | | IK | QGTRL | EC |
| | 1438) | FFLYSKLTVDKSR | | 1439) | | (SEQ | EIK | (SEQ |
| | | WQQGNVFSCSVMH | | | | ID | (SEQ | ID |
| | | EALHNHYTQKSLS | | | | NO: | ID | NO: |
| | | LSPG (SEQ ID | | | | 1363) | NO: | 45) |
| | | NO: 44) | | | | | 1359) | |
| PMAB | EVQLLE | ASTKGPSVFPLAP | GGGGSG | EVQLLE | GGGGSG | DIQMT | DIVMT | RTVAA |
| 6 | SGGGLV | SSKSTSGGTAALG | GGGSGG | SGGGLV | GGGSGG | QSPSS | QSPDS | PSVFI |
| | QPGGSL | CLVKDYFPEPVTV | GGS | QPGGSL | GGSGGG | LSASV | LAVSL | FPPSD |
| | RLSCAA | SWNSGALTSGVHT | (SEQ | RLSCAA | GS | GDRVT | GERAT | EQLKS |
| | SGFTFS | FPAVLQSSGLYSL | ID NO: | SGFTFS | (SEQ | ITCRA | INCKS | GTASV |
| | NSDMSW | SSVVTVPSSSLGT | 30) | SYWMHW | ID NO: | SQSIS | SQSVL | VCLLN |
| | VRQAPG | QTYICNVNHKPSN | | VRQAPG | 22) | SSLAW | YSPNN | NFYPR |
| | KGLEWV | TKVDKKVEPKSCD | | KGLEWI | | YQQKP | KNYLA | EAKVQ |
| | SGITIS | KTHTCPPCPAPEA | | SAISGS | | GKAPK | WYQQK | WKVDN |
| | GGSTYY | AGAPSVFLFPPKP | | GGSTYY | | LLIYA | PGQPP | ALQSG |
| | ADSVKG | KDTLMISRTPEVT | | ADSVKG | | ASSLQ | KLLIY | NSQES |
| | RFTISR | CVVVDVSHEDPEV | | RFTISR | | SGVPS | WASTR | VTEQD |
| | DNSKNT | KFNWYVDGVEVHN | | DNSKNT | | RFSGS | ESGVP | SKDST |
| | LYLQMN | AKTKPREEQYNST | | LYLQMN | | GSGTD | DRFSG | YSLSS |
| | SLRAED | YRVVSVLTVLHQD | | SLRAED | | FTLTI | SGSGT | TLTLS |
| | TAVYYC | WLNGKEYKCKVSN | | TAVYYC | | SSLQP | DFTLT | KADYE |
| | ARGRGG | KALPAPIEKTISK | | ARDRPY | | EDFAT | ISSLQ | KHKVY |
| | SGWLDY | AKGQPREPQVYTL | | GYYMDV | | YYCQQ | AEDVA | ACEVT |
| | WGQGTL | PPSREEMTKNQVS | | WGKGTT | | YKSYP | VYYCQ | HQGLS |
| | VTVSS | LTCLVKGFYPSDI | | VTVSS | | VTFGQ | QYYTT | SPVTK |
| | (SEQ | AVEWESNGQPENN | | (SEQ | | GTKVE | PPTFG | SFNRG |
| | ID NO: | YKTTPPVLDSDGS | | ID NO: | | IK | QGTRL | EC |
| | 1438) | FFLYSKLTVDKSR | | 1440) | | (SEQ | EIK | (SEQ |
| | | WQQGNVFSCSVMH | | | | ID | (SEQ | ID |
| | | EALHNHYTQKSLS | | | | NO: | ID | NO: |
| | | LSPG (SEQ ID | | | | 1367) | NO: | 45) |
| | | NO: 44) | | | | | 1359) | |
| PMAB | EVQLLE | ASTKGPSVFPLAP | GGGGSG | EVQLLE | GGGGSG | DIQMT | DIVMT | RTVAA |
| 7 | SGGGLV | SSKSTSGGTAALG | GGGSGG | SGGGLV | GGGSGG | QSPSS | QSPDS | PSVFI |
| | QPGGSL | CLVKDYFPEPVTV | GGS | QPGGSL | GGSGGG | LSASV | LAVSL | FPPSD |
| | RLSCAA | SWNSGALTSGVHT | (SEQ | RLSCAA | GS | GDRVT | GERAT | EQLKS |
| | SGFTFS | FPAVLQSSGLYSL | ID NO: | SGFTFS | (SEQ | ITCRA | INCKS | GTASV |
| | NSDMSW | SSVVTVPSSSLGT | 30) | SYWMHW | ID NO: | SQSIS | SQSVL | VCLLN |
| | VRQAPG | QTYICNVNHKPSN | | VRQAPG | 22) | SSLAW | YSPNN | NFYPR |
| | KGLEWV | TKVDKKVEPKSCD | | KGLEWI | | YQQKP | KNYLA | EAKVQ |
| | SGITIS | KTHTCPPCPAPEA | | SAISGS | | GKAPK | WYQQK | WKVDN |
| | GGSTYY | AGAPSVFLFPPKP | | GGSTYY | | LLIYA | PGQPP | ALQSG |
| | ADSVKG | KDTLMISRTPEVT | | ADSVKG | | ASSLQ | KLLIY | NSQES |
| | RFTISR | CVVVDVSHEDPEV | | RFTISR | | SGVPS | WASTR | VTEQD |
| | DNSKNT | KFNWYVDGVEVHN | | DNSKNT | | RFSGS | ESGVP | SKDST |
| | LYLQMN | AKTKPREEQYNST | | LYLQMN | | GSGTD | DRFSG | YSLSS |
| | SLRAED | YRVVSVLTVLHQD | | SLRAED | | FTLTI | SGSGT | TLTLS |
| | TAVYYC | WLNGKEYKCKVSN | | TAVYYC | | SSLQP | DFTLT | KADYE |
| | ARGRGG | KALPAPIEKTISK | | ARDRPY | | EDFAT | ISSLQ | KHKVY |
| | SGWLDY | AKGQPREPQVYTL | | YYYMDV | | YYCQQ | AEDVA | ACEVT |
| | WGQGTL | PPSREEMTKNQVS | | WGKGTT | | YKSYP | VYYCQ | HQGLS |
| | VTVSS | LTCLVKGFYPSDI | | VTVSS | | VTFGQ | QYYTT | SPVTK |
| | (SEQ | AVEWESNGQPENN | | (SEQ | | GTKVE | PPTFG | SFNRG |
| | ID NO: | YKTTPPVLDSDGS | | ID NO: | | IK | QGTRL | EC |
| | 1438) | FFLYSKLTVDKSR | | 1441) | | (SEQ | EIK | (SEQ |
| | | WQQGNVFSCSVMH | | | | ID | (SEQ | ID |
| | | EALHNHYTQKSLS | | | | NO: | ID | NO: |
| | | LSPG (SEQ ID | | | | 1367) | NO: | 45) |
| | | NO: 44) | | | | | 1359) | |
| PMAB | EVQLLE | ASTKGPSVFPLAP | GGGGSG | EVQLLE | GGGGSG | DIQMT | DIVMT | RTVAA |
| 8 | SGGGLV | SSKSTSGGTAALG | GGGSGG | SGGGLV | GGGSGG | QSPSS | QSPDS | PSVFI |
| | QPGGSL | CLVKDYFPEPVTV | GGS | QPGGSL | GGSGGG | LSASV | LAVSL | FPPSD |
| | RLSCAA | SWNSGALTSGVHT | (SEQ | RLSCAA | GS | GDRVT | GERAT | EQLKS |
| | SGFTFS | FPAVLQSSGLYSL | ID NO: | SGFTFS | (SEQ | ITCRA | INCKS | GTASV |
| | NSDMSW | SSVVTVPSSSLGT | 30) | SYWMHW | ID NO: | SQSIS | SQSVL | VCLLN |
| | VRQAPG | QTYICNVNHKPSN | | VRQAPG | 22) | RSLAW | YSPNN | NFYPR |
| | KGLEWV | TKVDKKVEPKSCD | | KGLEWI | | YQQKP | KNYLA | EAKVQ |
| | SGITIS | KTHTCPPCPAPEA | | SAISGS | | GKAPK | WYQQK | WKVDN |
| | GGSTYY | AGAPSVFLFPPKP | | GGSTYY | | LLIYA | PGQPP | ALQSG |
| | ADSVKG | KDTLMISRTPEVT | | ADSVKG | | ASSLQ | KLLIY | NSQES |
| | RFTISR | CVVVDVSHEDPEV | | RFTISR | | SGVPS | WASTR | VTEQD |
| | DNSKNT | KFNWYVDGVEVHN | | DNSKNT | | RFSGS | ESGVP | SKDST |
| | LYLQMN | AKTKPREEQYNST | | LYLQMN | | GSGTD | DRFSG | YSLSS |
| | SLRAED | YRVVSVLTVLHQD | | SLRAED | | FTLTI | SGSGT | TLTLS |
| | TAVYYC | WLNGKEYKCKVSN | | TAVYYC | | SSLQP | DFTLT | KADYE |
| | ARGRGG | KALPAPIEKTISK | | ARDRPY | | EDFAT | ISSLQ | KHKVY |
| | SGWLDY | AKGQPREPQVYTL | | GYYMDV | | YYCQQ | AEDVA | ACEVT |
| | WGQGTL | PPSREEMTKNQVS | | WGKGTT | | YKSYP | VYYCQ | HQGLS |
| | VTVSS | LTCLVKGFYPSDI | | VTVSS | | VTFGQ | QYYTT | SPVTK |
| | (SEQ | AVEWESNGQPENN | | (SEQ | | GTKVE | PPTFG | SFNRG |
| | ID NO: | YKTTPPVLDSDGS | | ID NO: | | IK | QGTRL | EC |
| | 1438) | FFLYSKLTVDKSR | | 1440) | | (SEQ | EIK | (SEQ |
| | | WQQGNVFSCSVMH | | | | ID | (SEQ | ID |
| | | EALHNHYTQKSLS | | | | NO: | ID | NO: |
| | | LSPG (SEQ ID | | | | 1363) | NO: | 45) |
| | | NO: 44) | | | | | 1359) | |
| PMAB | EVQLLE | ASTKGPSVFPLAP | GGGGSG | EVQLLE | GGGGSG | DIQMT | DIVMT | RTVAA |
| 9 | SGGGLV | SSKSTSGGTAALG | GGGSGG | SGGGLV | GGGSGG | QSPSS | QSPDS | PSVFI |
| | QPGGSL | CLVKDYFPEPVTV | GGS | QPGGSL | GGSGGG | LSASV | LAVSL | FPPSD |
| | RLSCAA | SWNSGALTSGVHT | (SEQ | RLSCAA | GS | GDRVT | GERAT | EQLKS |
| | SGFTFS | FPAVLQSSGLYSL | ID NO: | SGFTFS | (SEQ | ITCRA | INCKS | GTASV |
| | NSDMSW | SSVVTVPSSSLGT | 30) | SYWMHW | ID NO: | SQSIS | SQSVL | VCLLN |
| | VRQAPG | QTYICNVNHKPSN | | VRQAPG | 22) | RSLAW | YSPNN | NFYPR |
| | KGLEWV | TKVDKKVEPKSCD | | KGLEWI | | YQQKP | KNYLA | EAKVQ |
| | SGITIS | KTHTCPPCPAPEA | | SAISGS | | GKAPK | WYQQK | WKVDN |
| | GGSTYY | AGAPSVFLFPPKP | | GGSTYY | | LLIYA | PGQPP | ALQSG |
| | ADSVKG | KDTLMISRTPEVT | | ADSVKG | | ASSLQ | KLLIY | NSQES |
| | RFTISR | CVVVDVSHEDPEV | | RFTISR | | SGVPS | WASTR | VTEQD |
| | DNSKNT | KFNWYVDGVEVHN | | DNSKNT | | RFSGS | ESGVP | SKDST |
| | LYLQMN | AKTKPREEQYNST | | LYLQMN | | GSGTD | DRFSG | YSLSS |
| | SLRAED | YRVVSVLTVLHQD | | SLRAED | | FTLTI | SGSGT | TLTLS |
| | TAVYYC | WLNGKEYKCKVSN | | TAVYYC | | SSLQP | QFTLT | KADYE |
| | ARGRGG | KALPAPIEKTISK | | ARDRPY | | EDFAT | ISSLQ | KHKVY |
| | SGWLDY | AKGQPREPQVYTL | | YYYMDV | | YYCQQ | AEDVA | ACEVT |
| | WGQGTL | PPSREEMTKNQVS | | WGKGTT | | YKSYP | VYYCQ | HQGLS |
| | VTVSS | LTCLVKGFYPSDI | | VTVSS | | VTFGQ | QYYTT | SPVTK |
| | (SEQ | AVEWESNGQPENN | | (SEQ | | GTKVE | PPTFG | SFNRG |
| | ID NO: | YKTTPPVLDSDGS | | ID NO: | | IK | QGTRL | EC |
| | 1438) | FFLYSKLTVDKSR | | 1441) | | (SEQ | EIK | (SEQ |
| | | WQQGNVFSCSVMH | | | | ID | (SEQ | ID |
| | | EALHNHYTQKSLS | | | | NO: | ID | NO: |
| | | LSPG (SEQ ID | | | | 1363) | NO: | 45) |
| | | NO: 44) | | | | | 1359) | |
| PMAB | EVQLLE | ASTKGPSVFPLAP | GGGGSG | EVQLLE | GGGGSG | DIQMT | DIVMT | RTVAA |
| 10 | SGGGLV | SSKSTSGGTAALG | GGGSGG | SGGGLV | GGGSGG | QSPSS | QSPDS | PSVFI |
| | QPGGSL | CLVKDYFPEPVTV | GGS | QPGGSL | GGSGGG | LSASV | LAVSL | FPPSD |
| | RLSCAA | SWNSGALTSGVHT | (SEQ | RLSCAA | GS | GDRVT | GERAT | EQLKS |
| | SGFTFS | FPAVLQSSGLYSL | ID NO: | SGFTFS | (SEQ | ITCRA | INCKS | GTASV |
| | NSDMSW | SSVVTVPSSSLGT | 30) | SYWMHW | ID NO: | SQSIS | SQSVL | VCLLN |
| | VRQAPG | QTYICNVNHKPSN | | VRQAPG | 22) | SSLAW | YSPNN | NFYPR |
| | KGLEWV | TKVDKKVEPKSCD | | KGLEWV | | YQQKP | KNYLA | EAKVQ |
| | SGITIS | KTHTCPPCPAPEA | | SAISGS | | GKAPK | WYQQK | WKVDN |
| | GGSTYY | AGAPSVFLFPPKP | | GGSTYY | | LLIYA | PGQPP | ALQSG |
| | ADSVKG | KDTLMISRTPEVT | | ADSVKG | | ASSLQ | KLLIY | NSQES |
| | RFTISR | CVVVDVSHEDPEV | | RFTISR | | SGVPS | WASTR | VTEQD |
| | DNSKNT | KFNWYVDGVEVHN | | DNSKNT | | RFSGS | ESGVP | SKDST |
| | LYLQMN | AKTKPREEQYNST | | LYLQMN | | GSGTD | DRFSG | YSLSS |
| | SLRAED | YRVVSVLTVLHQD | | SLRAED | | FTLTI | SGSGT | TLTLS |
| | TAVYYC | WLNGKEYKCKVSN | | TAVYYC | | SSLQP | DFTLT | KADYE |
| | ARGRGG | KALPAPIEKTISK | | ARDRPY | | EDFAT | ISSLQ | KHKVY |
| | SGWLDY | AKGQPREPQVYTL | | GYYMDV | | YYCQQ | AEDVA | ACEVT |
| | WGQGTL | PPSREEMTKNQVS | | WGKGTT | | YKSYP | VYYCQ | HQGLS |
| | VTVSS | LTCLVKGFYPSDI | | VTVSS | | VTFGQ | QYYTT | SPVTK |
| | (SEQ | AVEWESNGQPENN | | (SEQ | | GTKVE | PPTFG | SFNRG |
| | ID NO: | YKTTPPVLDSDGS | | ID NO: | | IK | QGTRL | EC |
| | 1438) | FFLYSKLTVDKSR | | 1442) | | (SEQ | EIK | (SEQ |
| | | WQQGNVFSCSVMH | | | | ID | (SEQ | ID |
| | | EALHNHYTQKSLS | | | | NO: | ID | NO: |
| | | LSPG (SEQ ID | | | | 1367) | NO: | 45) |
| | | NO: 44) | | | | | 1359) | |
| PMAB | EVQLLE | ASTKGPSVFPLAP | GGGGSG | EVQLLE | GGGGSG | DIQMT | DIVMT | RTVAA |
| 11 | SGGGLV | SSKSTSGGTAALG | GGGSGG | SGGGLV | GGGSGG | QSPSS | QSPDS | PSVFI |
| | QPGGSL | CLVKDYFPEPVTV | GGS | QPGGSL | GGSGGG | LSASV | LAVSL | FPPSD |
| | RLSCAA | SWNSGALTSGVHT | (SEQ | RLSCAA | GS | GDRVT | GERAT | EQLKS |
| | SGFTFS | FPAVLQSSGLYSL | ID NO: | SGFTFS | (SEQ | ITCRA | INCKS | GTASV |
| | NSDMSW | SSVVTVPSSSLGT | 30) | SYWMHW | ID NO: | SQSIS | SQSVL | VCLLN |
| | VRQAPG | QTYICNVNHKPSN | | VRQAPG | 22) | SSLAW | YSPNN | NFYPR |
| | KGLEWV | TKVDKKVEPKSCD | | KGLEWV | | YQQKP | KNYLA | EAKVQ |
| | SGITIS | KTHTCPPCPAPEA | | SAISGS | | GKAPK | WYQQK | WKVDN |
| | GGSTYY | AGAPSVFLFPPKP | | GGSTYY | | LLIYA | PGQPP | ALQSG |
| | ADSVKG | KDTLMISRTPEVT | | ADSVKG | | ASSLQ | KLLIY | NSQES |
| | RFTISR | CVVVDVSHEDPEV | | RFTISR | | SGVPS | WASTR | VTEQD |
| | DNSKNT | KFNWYVDGVEVHN | | DNSKNT | | RFSGS | ESGVP | SKDST |
| | LYLQMN | AKTKPREEQYNST | | LYLQMN | | GSGTD | DRFSG | YSLSS |
| | SLRAED | YRVVSVLTVLHQD | | SLRAED | | FTLTI | SGSGT | TLTLS |
| | TAVYYC | WLNGKEYKCKVSN | | TAVYYC | | SSLQP | DFTLT | KADYE |
| | ARGRGG | KALPAPIEKTISK | | ARDRPY | | EDFAT | ISSLQ | KHKVY |
| | SGWLDY | AKGQPREPQVYTL | | YYYMDV | | YYCQQ | AEDVA | ACEVT |
| | WGQGTL | PPSREEMTKNQVS | | WGKGTT | | YKSYP | VYYCQ | HQGLS |
| | VTVSS | LTCLVKGFYPSDI | | VTVSS | | VTFGQ | QYYTT | SPVTK |
| | (SEQ | AVEWESNGQPENN | | (SEQ | | GTKVE | PPTFG | SFNRG |
| | ID NO: | YKTTPPVLDSDGS | | ID NO: | | IK | QGTRL | EC |
| | 1438) | FFLYSKLTVDKSR | | 1395) | | (SEQ | EIK | (SEQ |
| | | WQQGNVFSCSVMH | | | | ID | (SEQ | ID |
| | | EALHNHYTQKSLS | | | | NO: | ID | NO: |
| | | LSPG (SEQ ID | | | | 1367) | NO: | 45) |
| | | NO: 44) | | | | | 1359) | |
| PMAB | EVQLLE | ASTKGPSVFPLAP | GGGGSG | EVQLLE | GGGGSG | DIQMT | DIVMT | RTVAA |
| 12 | SGGGLV | SSKSTSGGTAALG | GGGSGG | SGGGLV | GGGSGG | QSPSS | QSPDS | PSVFI |
| | QPGGSL | CLVKDYFPEPVTV | GGS | QPGGSL | GGSGGG | LSASV | LAVSL | FPPSD |
| | RLSCAA | SWNSGALTSGVHT | (SEQ | RLSCAA | GS | GDRVT | GERAT | EQLKS |
| | SGFTFS | FPAVLQSSGLYSL | ID NO: | SGFTFS | (SEQ | ITCRA | INCKS | GTASV |
| | NSDMSW | SSVVTVPSSSLGT | 30) | SYWMHW | ID NO: | SQSIS | SQSVL | VCLLN |
| | VRQAPG | QTYICNVNHKPSN | | VRQAPG | 22) | RSLAW | YSPNN | NFYPR |
| | KGLEWV | TKVDKKVEPKSCD | | KGLEWV | | YQQKP | KNYLA | EAKVQ |
| | SGITIS | KTHTCPPCPAPEA | | SAISGS | | GKAPK | WYQQK | WKVDN |
| | GGSTYY | AGAPSVFLFPPKP | | GGSTYY | | LLIYA | PGQPP | ALQSG |
| | ADSVKG | KDTLMISRTPEVT | | ADSVKG | | ASSLQ | KLLIY | NSQES |
| | RFTISR | CVVVDVSHEDPEV | | RFTISR | | SGVPS | WASTR | VTEQD |
| | DNSKNT | KFNWYVDGVEVHN | | DNSKNT | | RFSGS | ESGVP | SKDST |
| | LYLQMN | AKTKPREEQYNST | | LYLQMN | | GSGTD | DRFSG | YSLSS |
| | SLRAED | YRVVSVLTVLHQD | | SLRAED | | ETLTI | SGSGT | TLTLS |
| | TAVYYC | WLNGKEYKCKVSN | | TAVYYC | | SSLQP | DFTLT | KADYE |
| | ARGRGG | KALPAPIEKTISK | | ARDRPY | | EDFAT | ISSLQ | KHKVY |
| | SGWLDY | AKGQPREPQVYTL | | GYYMDV | | YYCQQ | AEDVA | ACEVT |
| | WGQGTL | PPSREEMTKNQVS | | WGKGTT | | YKSYP | VYYCQ | HQGLS |
| | VTVSS | LTCLVKGFYPSDI | | VTVSS | | VTFGQ | QYYTT | SPVTK |
| | (SEQ | AVEWESNGQPENN | | (SEQ | | GTKVE | PPTFG | SFNRG |
| | ID NO: | YKTTPPVLDSDGS | | ID NO: | | IK | QGTRL | EC |
| | 1438) | FFLYSKLTVDKSR | | 1442) | | (SEQ | EIK | (SEQ |
| | | WQQGNVFSCSVMH | | | | ID | (SEQ | ID |
| | | EALHNHYTQKSLS | | | | NO: | ID | NO: |
| | | LSPG (SEQ ID | | | | 1363) | NO: | 45) |
| | | NO: 44) | | | | | 1359) | |
| PMAB | EVQLLE | ASTKGPSVFPLAP | GGGGSG | EVQLLE | GGGGSG | DIQMT | DIVMT | RTVAA |
| 13 | SGGGLV | SSKSTSGGTAALG | GGGSGG | SGGGLV | GGGSGG | QSPSS | QSPDS | PSVFI |
| | QPGGSL | CLVKDYFPEPVTV | GGS | QPGGSL | GGSGGG | LSASV | LAVSL | FPPSD |
| | RLSCAA | SWNSGALTSGVHT | (SEQ | RLSCAA | GS | GDRVT | GERAT | EQLKS |
| | SGFTFS | FPAVLQSSGLYSL | ID NO: | SGFTFS | (SEQ | ITCRA | INCKS | GTASV |
| | NSDMSW | SSVVTVPSSSLGT | 30) | SYWMHW | ID NO: | SQSIS | SQSVL | VCLLN |
| | VRQAPG | QTYICNVNHKPSN | | VRQAPG | 22) | RSLAW | YSPNN | NFYPR |
| | KGLEWV | TKVDKKVEPKSCD | | KGLEWV | | YQQKP | KNYLA | EAKVQ |
| | SGITIS | KTHTCPPCPAPEA | | SAISGS | | GKAPK | WYQQK | WKVDN |
| | GGSTYY | AGAPSVFLFPPKP | | GGSTYY | | LLIYA | PGQPP | ALQSG |
| | ADSVKG | KDTLMISRTPEVT | | ADSVKG | | ASSLQ | KLLIY | NSQES |
| | RFTISR | CVVVDVSHEDPEV | | RFTISR | | SGVPS | WASTR | VTEQD |
| | DNSKNT | KFNWYVDGVEVHN | | DNSKNT | | RFSGS | ESGVP | SKDST |
| | LYLQMN | AKTKPREEQYNST | | LYLQMN | | GSGTD | DRFSG | YSLSS |
| | SLRAED | YRVVSVLTVLHQD | | SLRAED | | FTLTI | SGSGT | TLTLS |
| | TAVYYC | WLNGKEYKCKVSN | | TAVYYC | | SSLQP | DFTLT | KADYE |
| | ARGRGG | KALPAPIEKTISK | | ARDRPY | | EDFAT | ISSLQ | KHKVY |
| | SGWLDY | AKGQPREPQVYTL | | YYYMDV | | YYCQQ | AEDVA | ACEVT |
| | WGQGTL | PPSREEMTKNQVS | | WGKGTT | | YKSYP | VYYCQ | HQGLS |
| | VTVSS | LTCLVKGFYPSDI | | VTVSS | | VTFGQ | QYYTT | SPVTK |
| | (SEQ | AVEWESNGQPENN | | (SEQ | | GTKVE | PPTFG | SFNRG |
| | ID NO: | YKTTPPVLDSDGS | | ID NO: | | IK | QGTRL | EC |
| | 1438) | FFLYSKLTVDKSR | | 1395) | | (SEQ | EIK | (SEQ |
| | | WQQGNVFSCSVMH | | | | ID | (SEQ | ID |
| | | EALHNHYTQKSLS | | | | NO: | ID | NO: |
| | | LSPG (SEQ ID | | | | 1363) | NO: | 45) |
| | | NO: 44) | | | | | 1359) | |
| PMAB | EVQLLE | ASTKGPSVFPLAP | GGGGSG | EVQLLE | GGGGSG | DIQMT | DIVMT | RTVAA |
| 14 | SGGGLV | SSKSTSGGTAALG | GGGSGG | SGGGLV | GGGSGG | QSPSS | QSPDS | PSVFI |
| | QPGGSL | CLVKDYFPEPVTV | GGS | QPGGSL | GGSGGG | LSASV | LAVSL | FPPSD |
| | RLSCAA | SWNSGALTSGVHT | (SEQ | RLSCAA | GS | GDRVT | GERAT | EQLKS |
| | SGFTFS | FPAVLQSSGLYSL | ID NO: | SGFTFS | (SEQ | ITCRA | INCKS | GTASV |
| | NSDMSW | SSVVTVPSSSLGT | 30) | SYWMHW | ID NO: | SQSIS | SQSVL | VCLLN |
| | VRQAPG | QTYICNVNHKPSN | | VRQAPG | 22) | SSLAW | YSPNN | NFYPR |
| | KGLEWV | TKVDKKVEPKSCD | | KGLEWV | | YQQKP | KNYLA | EAKVQ |
| | SGITIS | KTHTCPPCPAPEA | | SYISGS | | GKAPK | WYQQK | WKVDN |
| | GGSTYY | AGAPSVFLFPPKP | | GGYTNY | | LLIYA | PGQPP | ALQSG |
| | ADSVKG | KDTLMISRTPEVT | | ADSVKG | | ASSLQ | KLLIY | NSQES |
| | RFTISR | CVVVDVSHEDPEV | | RFTISR | | SGVPS | WASTR | VTEQD |
| | DNSKNT | KFNWYVDGVEVHN | | DNSKNT | | RFSGS | ESGVP | SKDST |
| | LYLQMN | AKTKPREEQYNST | | LYLQMN | | GSGTD | DRFSG | YSLSS |
| | SLRAED | YRVVSVLTVLHQD | | SLRAED | | FTLTI | SGSGT | TLTLS |
| | TAVYYC | WLNGKEYKCKVSN | | TAVYYC | | SSLQP | DFTLT | KADYE |
| | ARGRGG | KALPAPIEKTISK | | ARDRPY | | EDFAT | ISSLQ | KHKVY |
| | SGWLDY | AKGQPREPQVYTL | | GYYMDV | | YYCQQ | AEDVA | ACEVT |
| | WGQGTL | PPSREEMTKNQVS | | WGKGTT | | YKSYP | VYYCQ | HQGLS |
| | VTVSS | LTCLVKGFYPSDI | | VTVSS | | VTFGQ | QYYTT | SPVTK |
| | (SEQ | AVEWESNGQPENN | | (SEQ | | GTKVE | PPTFG | SFNRG |
| | ID NO: | YKTTPPVLDSDGS | | ID NO: | | IK | QGTRL | EC |
| | 1438) | FFLYSKLTVDKSR | | 1443) | | (SEQ | EIK | (SEQ |
| | | WQQGNVFSCSVMH | | | | ID | (SEQ | ID |
| | | EALHNHYTQKSLS | | | | NO: | ID | NO: |
| | | LSPG (SEQ ID | | | | 1367) | NO: | 45) |
| | | NO: 44) | | | | | 1359) | |
| PMAB | EVQLLE | ASTKGPSVFPLAP | GGGGSG | EVQLLE | GGGGSG | DIQMT | DIVMT | RTVAA |
| 15 | SGGGLV | SSKSTSGGTAALG | GGGSGG | SGGGLV | GGGSGG | QSPSS | QSPDS | PSVFI |
| | QPGGSL | CLVKDYFPEPVTV | GGS | QPGGSL | GGSGGG | LSASV | LAVSL | FPPSD |
| | RLSCAA | SWNSGALTSGVHT | (SEQ | RLSCAA | GS | GDRVT | GERAT | EQLKS |
| | SGFTFS | FPAVLQSSGLYSL | ID NO: | SGFTFS | (SEQ | ITCRA | INCKS | GTASV |
| | SYDMSW | SSVVTVPSSSLGT | 30) | SYWMHW | ID NO: | SQSIS | SQSVL | VCLLN |
| | VRQAPG | QTYICNVNHKPSN | | VRQAPG | 22) | SSLAW | YSPNN | NFYPR |
| | KGLEWV | TKVDKKVEPKSCD | | KGLEWV | | YQQKP | KNYLA | EAKVQ |
| | SGITIS | KTHTCPPCPAPEA | | SAISGS | | GKAPK | WYQQK | WKVDN |
| | GGSTYY | AGAPSVFLFPPKP | | GGSTYY | | LLIYA | PGQPP | ALQSG |
| | ADSVKG | KDTLMISRTPEVT | | ADSVKG | | ASSLQ | KLLIY | NSQES |
| | RFTISR | CVVVDVSHEDPEV | | RFTISR | | SGVPS | WASTR | VTEQD |
| | DNSKNT | KFNWYVDGVEVHN | | DNSKNT | | RFSGS | ESGVP | SKDST |
| | LYLQMN | AKTKPREEQYNST | | LYLQMN | | GSGTD | DRFSG | YSLSS |
| | SLRAED | YRVVSVLTVLHQD | | SLRAED | | FTLTI | SGSGT | TLTLS |
| | TAVYYC | WLNGKEYKCKVSN | | TAVYYC | | SSLQP | DFTLT | KADYE |
| | ARGRGG | KALPAPIEKTISK | | ARDRPY | | EDFAT | ISSLQ | KHKVY |
| | SGWLDY | AKGQPREPQVYTL | | YYDMDV | | YYCQQ | AEDVA | ACEVT |
| | WGQGTL | PPSREEMTKNQVS | | WGKGTT | | YKSYP | VYYCQ | HQGLS |
| | VTVSS | LTCLVKGFYPSDI | | VTVSS | | VTFGQ | QΥΥTT | SPVTK |
| | (SEQ | AVEWESNGQPENN | | (SEQ | | GTKVE | PPTFG | SFNRG |
| | ID NO: | YKTTPPVLDSDGS | | ID NO: | | IK | QGTRL | EC |
| | 1446) | FFLYSKLTVDKSR | | 1444) | | (SEQ | EIK | (SEQ |
| | | WQQGNVFSCSVMH | | | | ID | (SEQ | ID |
| | | EALHNHYTQKSLS | | | | NO: | ID | NO: |
| | | LSPG (SEQ ID | | | | 1367) | NO: | 45) |
| | | NO: 44) | | | | | 1359) | |
| PMAB | EVQLLE | ASTKGPSVFPLAP | GGGGSG | EVQLLE | GGGGSG | DIQMT | DIVMT | RTVAA |
| 16 | SGGGLV | SSKSTSGGTAALG | GGGSGG | SGGGLV | GGGSGG | QSPSS | QSPDS | PSVFI |
| | QPGGSL | CLVKDYFPEPVTV | GGS | QPGGSL | GGSGGG | LSASV | LAVSL | FPPSD |
| | RLSCAA | SWNSGALTSGVHT | (SEQ | RLSCAA | GS | GDRVT | GERAT | EQLKS |
| | SGFTFS | FPAVLQSSGLYSL | ID NO: | SGFTFS | (SEQ | ITCRA | INCKS | GTASV |
| | SYDMSW | SSVVTVPSSSLGT | 30) | SYWMHW | ID NO: | SQSIS | SQSVL | VCLLN |
| | VRQAPG | QTYICNVNHKPSN | | VRQAPG | 22) | SSLAW | YSPNN | NFYPR |
| | KGLEWV | TKVDKKVEPKSCD | | KGLEWV | | YQQKP | KNYLA | EAKVQ |
| | SGITIS | KTHTCPPCPAPEA | | SYISGS | | GKAPK | WYQQK | WKVDN |
| | GGSTYY | AGAPSVFLFPPKP | | GGYTNY | | LLIYA | PGQPP | ALQSG |
| | ADSVKG | KDTLMISRTPEVT | | ADSVKG | | ASSLQ | KLLIY | NSQES |
| | RFTISR | CVVVDVSHEDPEV | | RFTISR | | SGVPS | WASTR | VTEQD |
| | DNSKNT | KFNWYVDGVEVHN | | DNSKNT | | RFSGS | ESGVP | SKDST |
| | LYLQMN | AKTKPREEQYNST | | LYLQMN | | GSGTD | DRFSG | YSLSS |
| | SLRAED | YRVVSVLTVLHQD | | SLRAED | | FTLTI | SGSGT | TLTLS |
| | TAVYYC | WLNGKEYKCKVSN | | TAVYYC | | SSLQP | DFTLT | KADYE |
| | ARGRGG | KALPAPIEKTISK | | ARDRPY | | EDFAT | ISSLQ | KHKVY |
| | SGWLDY | AKGQPREPQVYTL | | YYDMDV | | YYCQQ | AEDVA | ACEVT |
| | WGQGTL | PPSREEMTKNQVS | | WGKGTT | | YKSYP | VYYCQ | HQGLS |
| | VTVSS | LTCLVKGFYPSDI | | VTVSS | | VTFGQ | QYYTT | SPVTK |
| | (SEQ | AVEWESNGQPENN | | (SEQ | | GTKVE | PPTFG | SFNRG |
| | ID NO: | YKTTPPVLDSDGS | | ID NO: | | IK | QGTRL | EC |
| | 1446) | FFLYSKLTVDKSR | | 1445) | | (SEQ | EIK | (SEQ |
| | | WQQGNVFSCSVMH | | | | ID | (SEQ | ID |
| | | EALHNHYTQKSLS | | | | NO: | ID | NO: |
| | | LSPG (SEQ ID | | | | 1367) | NO: | 45) |
| | | NO: 44) | | | | | 1359) | |
| PMAB | EVQLLE | ASTKGPSVFPLAP | GGGGSG | EVQLLE | GGGGSG | DIQMT | DIVMT | RTVAA |
| 17 | SGGGLV | SSKSTSGGTAALG | GGGSGG | SGGGLV | GGGSGG | QSPSS | QSPDS | PSVFI |
| | QPGGSL | CLVKDYFPEPVTV | GGS | QPGGSL | GGSGGG | LSASV | LAVSL | FPPSD |
| | RLSCAA | SWNSGALTSGVHT | (SEQ | RLSCAA | GS | GDRVT | GERAT | EQLKS |
| | SGFTFS | FPAVLQSSGLYSL | ID NO: | SGFTFS | (SEQ | ITCRA | INCKS | GTASV |
| | SYDMSW | SSVVTVPSSSLGT | 30) | SYWMHW | ID NO: | SQSIS | SQSVL | VCLLN |
| | VRQAPG | QTYICNVNHKPSN | | VRQAPG | 22) | SSLAW | YSPNN | NFYPR |
| | KGLEWV | TKVDKKVEPKSCD | | KGLEWV | | YQQKP | KNYLA | EAKVQ |
| | SGITIS | KTHTCPPCPAPEA | | SAISGS | | GKAPK | WYQQK | WKVDN |
| | GGSTYY | AGAPSVFLFPPKP | | GGSTYY | | LLIYA | PGQPP | ALQSG |
| | ADSVKG | KDTLMISRTPEVT | | ADSVKG | | ASSLQ | KLLIY | NSQES |
| | RFTISR | CVVVDVSHEDPEV | | RFTISR | | SGVPS | WASTR | VTEQD |
| | DNSKNT | KFNWYVDGVEVHN | | DNSKNT | | RFSGS | ESGVP | SKDST |
| | LYLQMN | AKTKPREEQYNST | | LYLQMN | | GSGTD | DRFSG | YSLSS |
| | SLRAED | YRVVSVLTVLHQD | | SLRAED | | FTLTI | SGSGT | TLTLS |
| | TAVYYC | WLNGKEYKCKVSN | | TAVYYC | | SSLQP | DFTLT | KADYE |
| | ARGRGG | KALPAPIEKTISK | | ARDRPY | | EDFAT | ISSLQ | KHKVY |
| | SGWLDY | AKGQPREPQVYTL | | GYYMDV | | YYCQQ | AEDVA | ACEVT |
| | WGQGTD | PPSREEMTKNQVS | | WGKGTT | | YKSYP | VYYCQ | HQGLS |
| | VTVSS | LTCLVKGFYPSDI | | VTVSS | | VTFGQ | QYYTT | SPVTK |
| | (SEQ | AVEWESNGQPENN | | (SEQ | | GTKVE | PPTFG | SFNRG |
| | ID NO: | YKTTPPVLDSDGS | | ID NO: | | IK | QGTRI | EC |
| | 1447) | FFLYSKLTVDKSR | | 1442) | | (SEQ | EIK | (SEQ |
| | | WQQGNVFSCSVMH | | | | ID | (SEQ | ID |
| | | EALHNHYTQKSLS | | | | NO: | ID | NO: |
| | | LSPG (SEQ ID | | | | 1367) | NO: | 45) |
| | | NO: 44) | | | | | 1359) | |
| PMAB | QVQLVQ | ASTKGPSVFPLAP | GGGGSG | EVQLLE | GGGGSG | DIQMT | DIQMT | RTVAA |
| 18 | SGAEVK | SSKSTSGGTAALG | GGGSGG | SGGGLV | GGGSGG | QSPSS | QSPSS | PSVFI |
| | KPGASV | CLVKDYFPEPVTV | GGS | QPGGSL | GGSGGG | LSASV | LSASV | FPPSD |
| | KVSCKA | SWNSGALTSGVHT | (SEQ | RLSCAA | GS | GDRVT | GDRVT | EQLKS |
| | SGYSFT | FPAVLQSSGLYSL | ID NO: | SGFTFS | (SEQ | ITCRA | ITCQA | GTASV |
| | TYYMHW | SSVVTVPSSSLGT | 30) | SYWMHW | ID NO: | SQSIS | SRDIK | VCLLN |
| | VRQAPG | QTYICNVNHKPSN | | VRQAPG | 22) | SSLAW | NYLAW | NFYPR |
| | QGLEWM | TKVDKKVEPKSCD | | KGLEWV | | YQQKP | YQQKP | EAKVQ |
| | GIIAPS | KTHTCPPCPAPEA | | SYISGS | | GKAPK | GKAPK | WKVDN |
| | GGSTSY | AGAPSVFLFPPKP | | GGYTNY | | LLIYA | LLIYA | ALQSG |
| | AQKFQG | KDTLMISRTPEVT | | ADSVKG | | ASSLQ | ASSLQ | NSQES |
| | RVTMTR | CVVVDVSHEDPEV | | RFTISR | | SGVPS | SGVPS | VTEQD |
| | DTSTST | KFNWYVDGVEVHN | | DNSKNT | | RFSGS | RFSGS | SKDST |
| | VYMELS | AKTKPREEQYNST | | LYLQMN | | GSGTD | GSGTD | YSLSS |
| | SLRSED | YRVVSVLTVLHQD | | SLRAED | | FTLTI | FTLTI | TLTLS |
| | TAVYYC | WLNGKEYKCKVSN | | TAVYYC | | SSLQP | SSLQP | KADYE |
| | ASGWVY | KALPAPIEKTISK | | ARDRPY | | EDFAT | EDFAT | KHKVY |
| | WGQGTL | AKGQPREPQVYTL | | YYDMDV | | YYCQQ | YYCQQ | ACEVT |
| | VTVSS | PPSREEMTKNQVS | | WGKGTT | | YKSYP | SYSTP | HQGLS |
| | (SEQ | LTCLVKGFYPSDI | | VTVSS | | VTFGQ | PTFGP | SPVTK |
| | ID NO: | AVEWESNGQPENN | | (SEQ | | GTKVE | GTKVD | SFNRG |
| | 1448) | YKTTPPVLDSDGS | | ID NO: | | IK | IK | EC |
| | | FFLYSKLTVDKSR | | 1445) | | (SEQ | (SEQ | (SEQ |
| | | WQQGNVFSCSVMH | | | | ID | ID | ID |
| | | EALHNHYTQKSLS | | | | NO: | NO: | NO: |
| | | LSPG (SEQ ID | | | | 1367) | 1449) | 45) |
| | | NO: 44) | | | | | | |
| PMAB | EVQLLE | ASTKGPSVFPLAP | GGGGSG | EVQLLE | GGGGSG | DIQMT | DIVMT | RTVAA |
| 19 | SGGGLV | SSKSTSGGTAALG | GGGSGG | SGGGLV | GGGSGG | QSPSS | QSPDS | PSVFI |
| | QPGGSL | CLVKDYFPEPVTV | GGS | QPGGSL | GGSGGG | LSASV | LAVSL | FPPSD |
| | RLSCAA | SWNSGALTSGVHT | (SEQ | RLSCAA | GS | GDRVT | GERAT | EQLKS |
| | SGFTFS | FPAVLQSSGLYSL | ID NO: | SGFTFS | (SEQ | ITCRA | INCKS | GTASV |
| | NSDMSW | SSVVTVPSSSLGT | 30) | SFWMHW | ID NO: | SQSVS | SQSVL | VCLLN |
| | VRQAPG | QTYICNVNHKPSN | | VRQAPG | 22) | RSLAW | YSPNN | NFYPR |
| | KGLEWV | TKVDKKVEPKSCD | | KGLEWI | | YQQKP | KNYLA | EAKVQ |
| | SGITIS | KTHTCPPCPAPEA | | SYISGD | | GKAPK | WYQQK | WKVDN |
| | GGSTYY | AGAPSVFLFPPKP | | SGYTNY | | LLIYA | PGQPP | ALQSG |
| | ADSVKG | KDTLMISRTPEVT | | ADSVKG | | ASSLQ | KLLIY | NSQES |
| | RFTISR | CVVVDVSHEDPEV | | RFTISR | | SGVPS | WASTR | VTEQD |
| | DNSKNT | KFNWYVDGVEVHN | | DNSKNT | | RFSGS | ESGVP | SKDST |
| | LYLQMN | AKTKPREEQYNST | | LYLQMN | | GSGTD | DRFSG | YSLSS |
| | SLRAED | YRVVSVLTVLHQD | | SLRAED | | FTLTI | SGSGT | TLTLS |
| | TAVYYC | WLNGKEYKCKVSN | | TAVYYC | | SSLQP | DFTLT | KADYE |
| | ARGRGG | KALPAPIEKTISK | | ARDRPY | | EDFAT | ISSLQ | KHKVY |
| | SGWLDY | AKGQPREPQVYTL | | YYYMDV | | YYCQQ | AEDVA | ACEVT |
| | WGQGTL | PPSREEMTKNQVS | | WGKGTT | | YKSYP | VYYCQ | HQGLS |
| | VTVSS | LTCLVKGFYPSDI | | VTVSS | | VTFGQ | QYYTT | SPVTK |
| | (SEQ | AVEWESNGQPENN | | (SEQ | | GTKVE | PPTFG | SFNRG |
| | ID NO: | YKTTPPVLDSDGS | | ID NO: | | IK | QGTRL | EC |
| | 1438) | FFLYSKLTVDKSR | | 1353) | | (SEQ | EIK | (SEQ |
| | | WQQGNVFSCSVMH | | | | ID | (SEQ | ID |
| | | EALHNHYTQKSLS | | | | NO: | ID | NO: |
| | | LSPG (SEQ ID | | | | 592) | NO: | 45) |
| | | NO: 44) | | | | | 1359) | |
| PMAB | EVQLLE | ASTKGPSVFPLAP | GGGGSG | EVQLLE | GGGGSG | DIQMT | DIVMT | RTVAA |
| 20 | SGGGLV | SSKSTSGGTAALG | GGGSGG | SGGGLV | GGGSGG | QSPSS | QSPDS | PSVFI |
| | QPGGSL | CLVKDYFPEPVTV | GGS | QPGGSL | GGSGGG | LSASV | LAVSL | FPPSD |
| | RLSCAA | SWNSGALTSGVHT | (SEQ | RLSCAA | GS | GDRVT | GERAT | EQLKS |
| | SGFTFS | FPAVLQSSGLYSL | ID NO: | SGFTFS | (SEQ | ITCRA | INCKS | GTASV |
| | NSDMSW | SSVVTVPSSSLGT | 30) | DYWMHW | ID NO: | SQSVS | SQSVL | VCLLN |
| | VRQAPG | QTYICNVNHKPSN | | VRQAPG | 22) | RSLAW | YSPNN | NFYPR |
| | KGLEWV | TKVDKKVEPKSCD | | KGLEWI | | YQQKP | KNYLA | EAKVQ |
| | SGITIS | KTHTCPPCPAPEA | | SYISGD | | GKAPK | WYQQK | WKVDN |
| | GGSTYY | AGAPSVFLFPPKP | | SGYTNY | | LLIYA | PGQPP | ALQSG |
| | ADSVKG | KDTLMISRTPEVT | | ADSVKG | | ASSLQ | KLLIY | NSQES |
| | RFTISR | CVVVDVSHEDPEV | | RFTISR | | SGVPS | WASTR | VTEQD |
| | DNSKNT | KFNWYVDGVEVHN | | DNSKNT | | RFSGS | ESGVP | SKDST |
| | LYLQMN | AKTKPREEQYNST | | LYLQMN | | GSGTD | DRFSG | YSLSS |
| | SLRAED | YRVVSVLTVLHQD | | SLRAED | | FTLTI | SGSGT | TLTLS |
| | TAVYYC | WLNGKEYKCKVSN | | TAVYYC | | SSLQP | DFTLT | KADYE |
| | ARGRGG | KALPAPIEKTISK | | ARDRPY | | EDFAT | ISSLQ | KHKVY |
| | SGWLDY | AKGQPREPQVYTL | | YYYMDV | | YYCQQ | AEDVA | ACEVT |
| | WGQGTL | PPSREEMTKNQVS | | WGKGTT | | YKSYP | VYYCQ | HQGLS |
| | VTVSS | LTCLVKGFYPSDI | | VTVSS | | VTFGQ | QYYTT | SPVTK |
| | (SEQ | AVEWESNGQPENN | | (SEQ | | GTKVE | PPTFG | SFNRG |
| | ID NO: | YKTTPPVLDSDGS | | ID NO: | | IK | QGTRL | EC |
| | 1438) | FFLYSKLTVDKSR | | 1391) | | (SEQ | EIK | (SEQ |
| | | WQQGNVFSCSVMH | | | | ID | (SEQ | ID |
| | | EALHNHYTQKSLS | | | | NO: | ID | NO: |
| | | LSPG (SEQ ID | | | | 592) | NO: | 45) |
| | | NO: 44) | | | | | 1359) | |
| PMAB | EVQLLE | ASTKGPSVFPLAP | GGGGSG | EVQLLE | GGGGSG | DIQMT | DIVMT | RTVAA |
| 21 | SGGGLV | SSKSTSGGTAALG | GGGSGG | SGGGLV | GGGSGG | QSPSS | QSPDS | PSVFI |
| | QPGGSL | CLVKDYFPEPVTV | GGS | QPGGSL | GGSGGG | LSASV | LAVSL | FPPSD |
| | RLSCAA | SWNSGALTSGVHT | (SEQ | RLSCAA | GS | GDRVT | GERAT | EQLKS |
| | SGFTFS | FPAVLQSSGLYSL | ID NO: | SGFTFS | (SEQ | ITCRA | INCKS | GTASV |
| | NSDMSW | SSVVTVPSSSLGT | 30) | DFAMHW | ID NO: | SQSVS | SQSVL | VCLLN |
| | VRQAPG | QTYICNVNHKPSN | | VRQAPG | 22) | RSLAW | YSPNN | NFYPR |
| | KGLEWV | TKVDKKVEPKSCD | | KGLEWI | | YQQKP | KNYLA | EAKVQ |
| | SGITIS | KTHTCPPCPAPEA | | SYISGD | | GKAPK | WYQQK | WKVDN |
| | GGSTYY | AGAPSVFLFPPKP | | SGYTNY | | LLIYA | PGQPP | ALQSG |
| | ADSVKG | KDTLMISRTPEVT | | ADSVKG | | ASSLQ | KLLIY | NSQES |
| | RFTISR | CVVVDVSHEDPEV | | RFTISR | | SGVPS | WASTR | VTEQD |
| | DNSKNT | KFNWYVDGVEVHN | | DNSKNT | | RFSGS | ESGVP | SKDST |
| | LYLQMN | AKTKPREEQYNST | | LYLQMN | | GSGTD | DRFSG | YSLSS |
| | SLRAED | YRVVSVLTVLHQD | | SLRAED | | FTLTI | SGSGT | TLTLS |
| | TAVYYC | WLNGKEYKCKVSN | | TAVYYC | | SSLQP | DFTLT | KADYE |
| | ARGRGG | KALPAPIEKTISK | | ARDRPY | | EDFAT | ISSLQ | KHKVY |
| | SGWLDY | AKGQPREPQVYTL | | YYYMDV | | YYCQQ | AEDVA | ACEVT |
| | WGQGTL | PPSREEMTKNQVS | | WGKGTT | | YKSYP | VYYCQ | HQGLS |
| | VTVSS | LTCLVKGFYPSDI | | VTVSS | | VTFGQ | QYYTT | SPVTK |
| | (SEQ | AVEWESNGQPENN | | (SEQ | | GTKVE | PPTFG | SFNRG |
| | ID NO: | YKTTPPVLDSDGS | | ID NO: | | IK | QGTRL | EC |
| | 1438) | FFLYSKLTVDKSR | | 1450) | | (SEQ | EIK | (SEQ |
| | | WQQGNVFSCSVMH | | | | ID | (SEQ | ID |
| | | EALHNHYTQKSLS | | | | NO: | ID | NO: |
| | | LSPG (SEQ ID | | | | 592) | NO: | 45) |
| | | NO: 44) | | | | | 1359) | |
| PMAB | EVQLLE | ASTKGPSVFPLAP | GGGGSG | EVQLLE | GGGGSG | DIQMT | DIVMT | RTVAA |
| 22 | SGGGLV | SSKSTSGGTAALG | GGGSGG | SGGGLV | GGGSGG | QSPSS | QSPDS | PSVFI |
| | QPGGSL | CLVKDYFPEPVTV | GGS | QPGGSL | GGSGGG | LSASV | LAVSL | FPPSD |
| | RLSCAA | SWNSGALTSGVHT | (SEQ | RLSCAA | GS | GDRVT | GERAT | EQLKS |
| | SGFTFS | FPAVLQSSGLYSL | ID NO: | SGFTFS | (SEQ | ITCRA | INCKS | GTASV |
| | NSDMSW | SSVVTVPSSSLGT | 30) | DFWMSW | ID NO: | SQSVS | SQSVL | VCLLN |
| | VRQAPG | QTYICNVNHKPSN | | VRQAPG | 22) | RSLAW | YSPNN | NFYPR |
| | KGLEWV | TKVDKKVEPKSCD | | KGLEWI | | YQQKP | KNYLA | EAKVQ |
| | SGITIS | KTHTCPPCPAPEA | | SYISGD | | GKAPK | WYQQK | WKVDN |
| | GGSTYY | AGAPSVFLFPPKP | | SGYTNY | | LLIYA | PGQPP | ALQSG |
| | ADSVKG | KDTLMISRTPEVT | | ADSVKG | | ASSLQ | KLLIY | NSQES |
| | RFTISR | CVVVDVSHEDPEV | | RFTISR | | SGVPS | WASTR | VTEQD |
| | DNSKNT | KFNWYVDGVEVHN | | DNSKNT | | RFSGS | ESGVP | SKDST |
| | LYLQMN | AKTKPREEQYNST | | LYLQMN | | GSGTD | DRFSG | YSLSS |
| | SLRAED | YRVVSVLTVLHQD | | SLRAED | | FTLTI | SGSGT | TLTLS |
| | TAVYYC | WLNGKEYKCKVSN | | TAVYYC | | SSLQP | DFTLT | KADYE |
| | ARGRGG | KALPAPIEKTISK | | ARDRPY | | EDFAT | ISSLQ | KHKVY |
| | SGWLDY | AKGQPREPQVYTL | | YYYMDV | | YYCQQ | AEDVA | ACEVT |
| | WGQGTL | PPSREEMTKNQVS | | WGKGTT | | YKSYP | VYYCQ | HQGLS |
| | VTVSS | LTCLVKGFYPSDI | | VTVSS | | VTFGQ | QYYTT | SPVTK |
| | (SEQ | AVEWESNGQPENN | | (SEQ | | GTKVE | PPTFG | SFNRG |
| | ID NO: | YKTTPPVLDSDGS | | ID NO: | | IK | QGTRL | EC |
| | 1438) | FFLYSKLTVDKSR | | 1451) | | (SEQ | EIK | (SEQ |
| | | WQQGNVFSCSVMH | | | | ID | (SEQ | ID |
| | | EALHNHYTQKSLS | | | | NO: | ID | NO: |
| | | LSPG (SEQ ID | | | | 592) | NO: | 45) |
| | | NO: 44) | | | | | 1359) | |
| PMAB | EVQLLE | ASTKGPSVFPLAP | GGGGSG | EVQLLE | GGGGSG | DIQMT | DIVMT | RTVAA |
| 23 | SGGGLV | SSKSTSGGTAALG | GGGSGG | SGGGLV | GGGSGG | QSPSS | QSPDS | PSVFI |
| | QPGGSL | CLVKDYFPEPVTV | GGS | QPGGSL | GGSGGG | LSASV | LAVSL | FPPSD |
| | RLSCAA | SWNSGALTSGVHT | (SEQ | RLSCAA | GS | GDRVT | GERAT | EQLKS |
| | SGFTFS | FPAVLQSSGLYSL | ID NO: | SGFTFS | (SEQ | ITCRA | INCKS | GTASV |
| | NSDMSW | SSVVTVPSSSLGT | 30) | DFWMHW | ID NO: | SQSVS | SQSVL | VCLLN |
| | VRQAPG | QTYICNVNHKPSN | | VRQAPG | 22) | RSLAW | YSPNN | NFYPR |
| | KGLEWV | TKVDKKVEPKSCD | | KGLEWV | | YQQKP | KNYLA | EAKVQ |
| | SGITIS | KTHTCPPCPAPEA | | SYISGD | | GKAPK | WYQQK | WKVDN |
| | GGSTYY | AGAPSVFLFPPKP | | SGYTNY | | LLIYA | PGQPP | ALQSG |
| | ADSVKG | KDTLMISRTPEVT | | ADSVKG | | ASSLQ | KLLIY | NSQES |
| | RFTISR | CVVVDVSHEDPEV | | RFTISR | | SGVPS | WASTR | VTEQD |
| | DNSKNT | KFNWYVDGVEVHN | | DNSKNT | | RFSGS | ESGVP | SKDST |
| | LYLQMN | AKTKPREEQYNST | | LYLQMN | | GSGTD | DRFSG | YSLSS |
| | SLRAED | YRVVSVLTVLHQD | | SLRAED | | FTLTI | SGSGT | TLTLS |
| | TAVYYC | WLNGKEYKCKVSN | | TAVYYC | | SSLQP | DFTLT | KADYE |
| | ARGRGG | KALPAPIEKTISK | | ARDRPY | | EDFAT | ISSLQ | KHKVY |
| | SGWLDY | AKGQPREPQVYTL | | YYYMDV | | YYCQQ | AEDVA | ACEVT |
| | WGQGTL | PPSREEMTKNQVS | | WGKGTT | | YKSYP | VYYCQ | HQGLS |
| | VTVSS | LTCLVKGFYPSDI | | VTVSS | | VTFGQ | QYYTT | SPVTK |
| | (SEQ | AVEWESNGQPENN | | (SEQ | | GTKVE | PPTFG | SFNRG |
| | ID NO: | YKTTPPVLDSDGS | | ID NO: | | IK | QGTRI | EC |
| | 1438) | FFLYSKLTVDKSR | | 1452) | | (SEQ | EIK | (SEQ |
| | | WQQGNVFSCSVMH | | | | ID | (SEQ | ID |
| | | EALHNHYTQKSLS | | | | NO: | ID | NO: |
| | | LSPG (SEQ ID | | | | 592) | NO: | 45) |
| | | NO: 44) | | | | | 1359) | |
| PMAB | EVQLLE | ASTKGPSVFPLAP | GGGGSG | EVQLLE | GGGGSG | DIQMT | DIVMT | RTVAA |
| 24 | SGGGLV | SSKSTSGGTAALG | GGGSGG | SGGGLV | GGGSGG | QSPSS | QSPDS | PSVFI |
| | QPGGSL | CLVKDYFPEPVTV | GGS | QPGGSL | GGSGGG | LSASV | LAVSL | FPPSD |
| | RLSCAA | SWNSGALTSGVHT | (SEQ | RLSCAA | GS | GDRVT | GERAT | EQLKS |
| | SGFTFS | FPAVLQSSGLYSL | ID NO: | SGFTFS | (SEQ | ITCRA | INCKS | GTASV |
| | NSDMSW | SSVVTVPSSSLGT | 30) | DFWMHW | ID NO: | SQSVS | SQSVL | VCLLN |
| | VRQAPG | QTYICNVNHKPSN | | VRQAPG | 22) | RSLAW | YSPNN | NFYPR |
| | KGLEWV | TKVDKKVEPKSCD | | KGLEWI | | YQQKP | KNYLA | EAKVQ |
| | SGITIS | KTHTCPPCPAPEA | | SAISGD | | GKAPK | WYQQK | WKVDN |
| | GGSTYY | AGAPSVFLFPPKP | | SGYTNY | | LLIYA | PGQPP | ALQSG |
| | ADSVKG | KDTLMISRTPEVT | | ADSVKG | | ASSLQ | KLLIY | NSQES |
| | RFTISR | CVVVDVSHEDPEV | | RFTISR | | SGVPS | WASTR | VTEQD |
| | DNSKNT | KFNWYVDGVEVHN | | DNSKNT | | RFSGS | ESGVP | SKDST |
| | LYLQMN | AKTKPREEQYNST | | LYLQMN | | GSGTD | DRFSG | YSLSS |
| | SLRAED | YRVVSVLTVLHQD | | SLRAED | | FTLTI | SGSGT | TLTLS |
| | TAVYYC | WLNGKEYKCKVSN | | TAVYYC | | SSLQP | DFTLT | KADYE |
| | ARGRGG | KALPAPIEKTISK | | ARDRPY | | EDFAT | ISSLQ | KHKVY |
| | SGWLDY | AKGQPREPQVYTL | | YYYMDV | | YYCQQ | AEDVA | ACEVT |
| | WGQGTL | PPSREEMTKNQVS | | WGKGTT | | YKSYP | VYYCQ | HQGLS |
| | VTVSS | LTCLVKGFYPSDI | | VTVSS | | VTFGQ | QYYTT | SPVTK |
| | (SEQ | AVEWESNGQPENN | | (SEQ | | GTKVE | PPTFG | SFNRG |
| | ID NO: | YKTTPPVLDSDGS | | ID NO: | | IK | QGTRL | EC |
| | 1438) | FFLYSKLTVDKSR | | 1453) | | (SEQ | EIK | (SEQ |
| | | WQQGNVFSCSVMH | | | | ID | (SEQ | ID |
| | | EALHNHYTQKSLS | | | | NO: | ID | NO: |
| | | LSPG (SEQ ID | | | | 592) | NO: | 45) |
| | | NO: 44) | | | | | 1359) | |
| PMAB | EVQLLE | ASTKGPSVFPLAP | GGGGSG | EVQLLE | GGGGSG | DIQMT | DIVMT | RTVAA |
| 25 | SGGGLV | SSKSTSGGTAALG | GGGSGG | SGGGLV | GGGSGG | QSPSS | QSPDS | PSVFI |
| | QPGGSL | CLVKDYFPEPVTV | GGS | QPGGSL | GGSGGG | LSASV | LAVSL | FPPSD |
| | RLSCAA | SWNSGALTSGVHT | (SEQ | RLSCAA | GS | GDRVT | GERAT | EQLKS |
| | SGFTFS | FPAVLQSSGLYSL | ID NO: | SGFTFS | (SEQ | ITCRA | INCKS | GTASV |
| | NSDMSW | SSVVTVPSSSLGT | 30) | DFWMHW | ID NO: | SQSVS | SQSVL | VCLLN |
| | VRQAPG | QTYICNVNHKPSN | | VRQAPG | 22) | RSLAW | YSPNN | NFYPR |
| | KGLEWV | TKVDKKVEPKSCD | | KGLEWI | | YQQKP | KNYLA | EAKVQ |
| | SGITIS | KTHTCPPCPAPEA | | SYISGS | | GKAPK | WYQQK | WKVDN |
| | GGSTYY | AGAPSVFLFPPKP | | SGYTNY | | LLIYA | PGQPP | ALQSG |
| | ADSVKG | KDTLMISRTPEVT | | ADSVKG | | ASSLQ | KLLIY | NSQES |
| | RFTISR | CVVVDVSHEDPEV | | RFTISR | | SGVPS | WASTR | VTEQD |
| | DNSKNT | KFNWYVDGVEVHN | | DNSKNT | | RFSGS | ESGVP | SKDST |
| | LYLQMN | AKTKPREEQYNST | | LYLQMN | | GSGTD | DRFSG | YSLSS |
| | SLRAED | YRVVSVLTVLHQD | | SLRAED | | FTLTI | SGSGT | TLTLS |
| | TAVYYC | WLNGKEYKCKVSN | | TAVYYC | | SSLQP | DFTLT | KADYE |
| | ARGRGG | KALPAPIEKTISK | | ARDRPY | | EDFAT | ISSLQ | KHKVY |
| | SGWLDY | AKGQPREPQVYTL | | YYYMDV | | YYCQQ | AEDVA | ACEVT |
| | WGQGTL | PPSREEMTKNQVS | | WGKGTT | | YKSYP | VYYCQ | HQGLS |
| | VTVSS | LTCLVKGFYPSDI | | VTVSS | | VTFGQ | QYYTT | SPVTK |
| | (SEQ | AVEWESNGQPENN | | (SEQ | | GTKVE | PPTFG | SFNRG |
| | ID NO: | YKTTPPVLDSDGS | | ID NO: | | IK | QGTRL | EC |
| | 1438) | FFLYSKLTVDKSR | | 1454) | | (SEQ | EIK | (SEQ |
| | | WQQGNVFSCSVMH | | | | ID | (SEQ | ID |
| | | EALHNHYTQKSLS | | | | NO: | ID | NO: |
| | | LSPG (SEQ ID | | | | 592) | NO: | 45) |
| | | NO: 44) | | | | | 1359) | |
| PMAB | EVQLLE | ASTKGPSVFPLAP | GGGGSG | EVQLLE | GGGGSG | DIQMT | DIVMT | RTVAA |
| 26 | SGGGLV | SSKSTSGGTAALG | GGGSGG | SGGGLV | GGGSGG | QSPSS | QSPDS | PSVFI |
| | QPGGSL | CLVKDYFPEPVTV | GGS | QPGGSL | GGSGGG | LSASV | LAVSL | FPPSD |
| | RLSCAA | SWNSGALTSGVHT | (SEQ | RLSCAA | GS | GDRVT | GERAT | EQLKS |
| | SGFTFS | FPAVLQSSGLYSL | ID NO: | SGFTFS | (SEQ | ITCRA | INCKS | GTASV |
| | NSDMSW | SSVVTVPSSSLGT | 30) | DFWMHW | ID NO: | SQSVS | SQSVL | VCLLN |
| | VRQAPG | QTYICNVNHKPSN | | VRQAPG | 22) | RSLAW | YSPNN | NFYPR |
| | KGLEWV | TKVDKKVEPKSCD | | KGLEWI | | YQQKP | KNYLA | EAKVQ |
| | SGITIS | KTHTCPPCPAPEA | | SYISGD | | GKAPK | WYQQK | WKVDN |
| | GGSTYY | AGAPSVFLFPPKP | | GGYTNY | | LLIYA | PGQPP | ALQSG |
| | ADSVKG | KDTLMISRTPEVT | | ADSVKG | | ASSLQ | KLLIY | NSQES |
| | RFTISR | CVVVDVSHEDPEV | | RFTISR | | SGVPS | WASTR | VTEQD |
| | DNSKNT | KFNWYVDGVEVHN | | DNSKNT | | RFSGS | ESGVP | SKDST |
| | LYLQMN | AKTKPREEQYNST | | LYLQMN | | GSGTD | DRFSG | YSLSS |
| | SLRAED | YRVVSVLTVLHQD | | SLRAED | | FTLTI | SGSGT | TLTLS |
| | TAVYYC | WLNGKEYKCKVSN | | TAVYYC | | SSLQP | DFTLT | KADYE |
| | ARGRGG | KALPAPIEKTISK | | ARDRPY | | EDFAT | ISSLQ | KHKVY |
| | SGWLDY | AKGQPREPQVYTL | | YYYMDV | | YYCQQ | AEDVA | ACEVT |
| | WGQGTL | PPSREEMTKNQVS | | WGKGTT | | YKSYP | VYYCQ | HQGLS |
| | VTVSS | LTCLVKGFYPSDI | | VTVSS | | VTFGQ | QYYTT | SPVTK |
| | (SEQ | AVEWESNGQPENN | | (SEQ | | GTKVE | PPTFG | SFNRG |
| | ID NO: | YKTTPPVLDSDGS | | ID NO: | | IK | QGTRL | EC |
| | 1438) | FFLYSKLTVDKSR | | 1455) | | (SEQ | EIK | (SEQ |
| | | WQQGNVFSCSVMH | | | | ID | (SEQ | ID |
| | | EALHNHYTQKSLS | | | | NO: | ID | NO: |
| | | LSPG (SEQ ID | | | | 592) | NO: | 45) |
| | | NO: 44) | | | | | 1359) | |
| PMAB | EVQLLE | ASTKGPSVFPLAP | GGGGSG | EVQLLE | GGGGSG | DIQMT | DIVMT | RTVAA |
| 27 | SGGGLV | SSKSTSGGTAALG | | SGGGLV | GGGSGG | QSPSS | QSPDS | PSVFI |
| | QPGGSL | CLVKDYFPEPVTV | GGGSGG | QPGGSL | GGSGGG | LSASV | LAVSL | FPPSD |
| | RLSCAA | SWNSGALTSGVHT | GGS | RLSCAA | GS | GDRVT | GERAT | EQLKS |
| | SGFTFS | FPAVLQSSGLYSL | (SEQ | SGFTFS | SEQ | ITCRA | INCKS | GTASV |
| | NSDMSW | SSVVTVPSSSLGT | ID NO: | DFWMHW | ID NO: | SQSVS | SQSVL | VCLLN |
| | VRQAPG | QTYICNVNHKPSN | 30) | VRQAPG | 22) | RSLAW | YSPNN | NFYPR |
| | KGLEWV | TKVDKKVEPKSCD | | KGLEWI | | YQQKP | KNYLA | EAKVQ |
| | SGITIS | KTHTCPPCPAPEA | | SYISGD | | GKAPK | WYQQK | WKVDN |
| | GGSTYY | AGAPSVFLFPPKP | | SGSTNY | | LLIYA | PGQPP | ALQSG |
| | ADSVKG | KDTLMISRTPEVT | | ADSVKG | | ASSLQ | KLLIY | NSQES |
| | RFTISR | CVVVDVSHEDPEV | | RFTISR | | SGVPS | WASTR | VTEQD |
| | DNSKNT | KFNWYVDGVEVHN | | DNSKNT | | RFSGS | ESGVP | SKDST |
| | LYLQMN | AKTKPREEQYNST | | LYLQMN | | GSGTD | DRFSG | YSLSS |
| | SLRAED | YRVVSVLTVLHQD | | SLRAED | | FTLTI | SGSGT | ILTLS |
| | TAVYYC | WLNGKEYKCKVSN | | TAVYYC | | SSLQP | DFTLT | KADYE |
| | ARGRGG | KALPAPIEKTISK | | ARDRPY | | EDFAT | ISSLQ | KHKVY |
| | SGWLDY | AKGQPREPQVYTL | | YYYMDV | | YYCQQ | AEDVA | ACEVT |
| | WGQGTL | PPSREEMTKNQVS | | WGKGTT | | YKSYP | VYYCQ | HQGLS |
| | VTVSS | LTCLVKGFYPSDI | | VTVSS | | VTFGQ | QYYTT | SPVTK |
| | (SEQ | AVEWESNGQPENN | | (SEQ | | GTKVE | PPTFG | SFNRG |
| | ID NO: | YKTTPPVLDSDGS | | ID NO: | | IK | QGTRL | EC |
| | 1438) | FFLYSKLTVDKSR | | 1456) | | (SEQ | EIK | (SEQ |
| | | WQQGNVFSCSVMH | | | | ID | (SEQ | ID |
| | | EALHNHYTQKSLS | | | | NO: | ID | NO: |
| | | LSPG (SEQ ID | | | | 592) | NO: | 45) |
| | | NO: 44) | | | | | 1359) | |
| PMAB | EVQLLE | ASTKGPSVFPLAP | GGGGSG | EVQLLE | GGGGSG | DIQMT | DIVMT | RTVAA |
| 28 | SGGGLV | SSKSTSGGTAALG | GGGSGG | SGGGLV | GGGSGG | QSPSS | QSPDS | PSVFI |
| | QPGGSL | CLVKDYFPEPVTV | GGS | QPGGSL | GGSGGG | LSASV | LAVSL | FPPSD |
| | RLSCAA | SWNSGALTSGVHT | (SEQ | RLSCAA | GS | GDRVT | GERAT | EQLKS |
| | SGFTFS | FPAVLQSSGLYSL | ID NO: | SGFTFS | (SEQ | ITCRA | INCKS | GTASV |
| | NSDMSW | SSVVTVPSSSLGT | 30) | DFWMHW | ID NO: | SQSVS | SQSVL | VCLLN |
| | VRQAPG | QTYICNVNHKPSN | | VRQAPG | 22) | RSLAW | YSPNN | NFYPR |
| | KGLEWV | TKVDKKVEPKSCD | | KGLEWI | | YQQKP | KNYLA | EAKVQ |
| | SGITIS | KTHTCPPCPAPEA | | SYISGD | | GKAPK | WYQQK | WKVDN |
| | GGSTYY | AGAPSVFLFPPKP | | SGYTYY | | LLIYA | PGQPP | ALQSG |
| | ADSVKG | KDTLMISRTPEVT | | ADSVKG | | ASSLQ | KLLIY | NSQES |
| | RFTISR | CVVVDVSHEDPEV | | RFTISR | | SGVPS | WASTR | VTEQD |
| | DNSKNT | KFNWYVDGVEVHN | | DNSKNT | | RFSGS | ESGVP | SKDST |
| | LYLQMN | AKTKPREEQYNST | | LYLQMN | | GSGTD | DRFSG | YSLSS |
| | SLRAED | YRVVSVLTVLHQD | | SLRAED | | FTLTI | SGSGT | TLTLS |
| | TAVYYC | WLNGKEYKCKVSN | | TAVYYC | | SSLQP | DFTLT | KADYE |
| | ARGRGG | KALPAPIEKTISK | | ARDRPY | | EDFAT | ISSLQ | KHKVY |
| | SGWLDY | AKGQPREPQVYTL | | YYYMDV | | YYCQQ | AEDVA | ACEVT |
| | WGQGTL | PPSREEMTKNQVS | | WGKGTT | | YKSYP | VYYCQ | HQGLS |
| | VTVSS | LTCLVKGFYPSDI | | VTVSS | | VTFGQ | QYYTT | SPVTK |
| | (SEQ | AVEWESNGQPENN | | (SEQ | | GTKVE | PPTFG | SFNRG |
| | ID NO: | YKTTPPVLDSDGS | | ID NO: | | IK | QGTRL | EC |
| | 1438) | FFLYSKLTVDKSR | | 1457) | | (SEQ | EIK | (SEQ |
| | | WQQGNVFSCSVMH | | | | ID | (SEQ | ID |
| | | EALHNHYTQKSLS | | | | NO: | ID | NO: |
| | | LSPG (SEQ ID | | | | 592) | NO: | 45) |
| | | NO: 44) | | | | | 1359) | |
| PMAB | EVQLLE | ASTKGPSVFPLAP | GGGGSG | EVQLLE | GGGGSG | DIQMT | DIVMT | RTVAA |
| 29 | SGGGLV | SSKSTSGGTAALG | GGGSGG | SGGGLV | GGGSGG | QSPSS | QSPDS | PSVFI |
| | QPGGSL | CLVKDYFPEPVTV | GGS | QPGGSL | GGSGGG | LSASV | LAVSL | FPPSD |
| | RLSCAA | SWNSGALTSGVHT | (SEQ | RLSCAA | GS | GDRVT | GERAT | EQLKS |
| | SGFTFS | FPAVLQSSGLYSL | ID NO: | SGFTFS | (SEQ | ITCRA | INCKS | GTASV |
| | NSDMSW | SSVVTVPSSSLGT | 30) | DFWMHW | ID NO: | SQSVS | SQSVL | VCLLN |
| | VRQAPG | QTYICNVNHKPSN | | VRQAPG | 22) | RSLAW | YSPNN | NFYPR |
| | KGLEWV | TKVDKKVEPKSCD | | KGLEWI | | YQQKP | KNYLA | EAKVQ |
| | SGITIS | KTHTCPPCPAPEA | | SYISGD | | GKAPK | WYQQK | WKVDN |
| | GGSTYY | AGAPSVFLFPPKP | | SGYTNY | | LLIYA | PGQPP | ALQSG |
| | ADSVKG | KDTLMISRTPEVT | | AASVKG | | ASSLQ | KLLIY | NSQES |
| | RFTISR | CVVVDVSHEDPEV | | RFTISR | | SGVPS | WASTR | VTEQD |
| | DNSKNT | KFNWYVDGVEVHN | | DNSKNT | | RFSGS | ESGVP | SKDST |
| | LYLQMN | AKTKPREEQYNST | | LYLQMN | | GSGTD | DRFSG | YSLSS |
| | SLRAED | YRVVSVLTVLHQD | | SLRAED | | FTLTI | SGSGT | TLTLS |
| | TAVYYC | WLNGKEYKCKVSN | | TAVYYC | | SSLQP | DFTLT | KADYE |
| | ARGRGG | KALPAPIEKTISK | | ARDRPY | | EDFAT | ISSLQ | KHKVY |
| | SGWLDY | AKGQPREPQVYTL | | YYYMDV | | YYCQQ | AEDVA | ACEVT |
| | WGQGTL | PPSREEMTKNQVS | | WGKGTT | | YKSYP | VYYCQ | HQGLS |
| | VTVSS | LTCLVKGFYPSDI | | VTVSS | | VTFGQ | QYYTT | SPVTK |
| | (SEQ | AVEWESNGQPENN | | (SEQ | | GTKVE | PPTFG | SFNRG |
| | ID NO: | YKTTPPVLDSDGS | | ID NO: | | IK | QGTRL | EC |
| | 1438) | FFLYSKLTVDKSR | | 1458) | | (SEQ | EIK | (SEQ |
| | | WQQGNVFSCSVMH | | | | ID | (SEQ | ID |
| | | EALHNHYTQKSLS | | | | NO: | ID | NO: |
| | | LSPG (SEQ ID | | | | 592) | NO: | 45) |
| | | NO: 44) | | | | | 1359) | |
| PMAB | EVQLLE | ASTKGPSVFPLAP | GGGGSG | EVQLLE | GGGGSG | DIQMT | DIVMT | RTVAA |
| 30 | SGGGLV | SSKSTSGGTAALG | GGGSGG | SGGGLV | GGGSGG | QSPSS | QSPDS | PSVFI |
| | QPGGSL | CLVKDYFPEPVTV | GGS | QPGGSL | GGSGGG | LSASV | LAVSL | FPPSD |
| | RLSCAA | SWNSGALTSGVHT | (SEQ | RLSCAA | GS | GDRVT | GERAT | EQLKS |
| | SGFTFS | FPAVLQSSGLYSL | ID NO: | SGFTFS | (SEQ | ITCRA | INCKS | GTASV |
| | NSDMSW | SSVVTVPSSSLGT | 30) | DFWMHW | ID NO: | SQSVS | SQSVL | VCLLN |
| | VRQAPG | QTYICNVNHKPSN | | VRQAPG | 22) | RSLAW | YSPNN | NFYPR |
| | KGLEWV | TKVDKKVEPKSCD | | KGLEWI | | YQQKP | KNYLA | EAKVQ |
| | SGITIS | KTHTCPPCPAPEA | | SYISGD | | GKAPK | WYQQK | WKVDN |
| | GGSTYY | AGAPSVFLFPPKP | | SGYTNY | | LLIYA | PGQPP | ALQSG |
| | ADSVKG | KDTLMISRTPEVT | | AQSVKG | | ASSIQ | KLLIY | NSQES |
| | RFTISR | CVVVDVSHEDPEV | | RFTISR | | SGVPS | WASTR | VTEQD |
| | DNSKNT | KFNWYVDGVEVHN | | DNSKNT | | RFSGS | ESGVP | SKDST |
| | LYLQMN | AKTKPREEQYNST | | LYLQMN | | GSGTD | DRFSG | YSLSS |
| | SLRAED | YRVVSVLTVLHQD | | SLRAED | | FTLTI | SGSGT | TLTLS |
| | TAVYYC | WLNGKEYKCKVSN | | TAVYYC | | SSLQP | DFTLT | KADYE |
| | ARGRGG | KALPAPIEKTISK | | ARDRPY | | EDFAT | ISSLQ | KHKVY |
| | SGWLDY | AKGQPREPQVYTL | | YYYMDV | | YYCQQ | AEDVA | ACEVT |
| | WGQGTL | PPSREEMTKNQVS | | WGKGTT | | YKSYP | VYYCQ | HQGLS |
| | VTVSS | LTCLVKGFYPSDI | | VTVSS | | VTFGQ | QYYTT | SPVTK |
| | SEQ | AVEWESNGQPENN | | (SEQ | | GTKVE | PPTFG | SFNRG |
| | ID NO: | YKTTPPVLDSDGS | | ID NO: | | IK | QGTRL | EC |
| | 1438) | FFLYSKLTVDKSR | | 1459) | | (SEQ | EIK | (SEQ |
| | | WQQGNVFSCSVMH | | | | ID | (SEQ | ID |
| | | EALHNHYTQKSLS | | | | NO: | ID | NO: |
| | | LSPG (SEQ ID | | | | 592) | NO: | 45) |
| | | NO: 44) | | | | | 1359) | |
| PMAB | EVQLLE | ASTKGPSVFPLAP | GGGGSG | EVQLLE | GGGGSG | DIQMT | DIVMT | RTVAA |
| 31 | SGGGLV | SSKSTSGGTAALG | GGGSGG | SGGGLV | GGGSGG | QSPSS | QSPDS | PSVFI |
| | QPGGSL | CLVKDYFPEPVTV | GGS | QPGGSL | GGSGGG | LSASV | LAVSL | FPPSD |
| | RLSCAA | SWNSGALTSGVHT | (SEQ | RLSCAA | GS | GDRVT | GERAT | EQLKS |
| | SGFTFS | FPAVLQSSGLYSL | ID NO: | SGFTFS | (SEQ | ITCRA | INCKS | GTASV |
| | NSDMSW | SSVVTVPSSSLGT | 30) | DFWMHW | ID NO: | SQSVS | SQSVL | VCLLN |
| | VRQAPG | QTYICNVNHKPSN | | VRQAPG | 22) | RSLAW | YSPNN | NFYPR |
| | KGLEWV | TKVDKKVEPKSCD | | KGLEWI | | YQQKP | KNYLA | EAKVQ |
| | SGITIS | KTHTCPPCPAPEA | | SYISGD | | GKAPK | WYQQK | WKVDN |
| | GGSTYY | AGAPSVFLFPPKP | | SGYTNY | | LLIYA | PGQPP | ALQSG |
| | ADSVKG | KDTLMISRTPEVT | | ADSVKG | | ASSLQ | KLLIY | NSQES |
| | RFTISR | CVVVDVSHEDPEV | | RFTISR | | SGVPS | WASTR | VTEQD |
| | DNSKNT | KFNWYVDGVEVHN | | DASKNT | | RFSGS | ESGVP | SKDST |
| | LYLQMN | AKTKPREEQYNST | | LYLQMN | | GSGTD | DRFSG | YSLSS |
| | SLRAED | YRVVSVLTVLHQD | | SLRAED | | FTLTI | SGSGT | TLTLS |
| | TAVYYC | WLNGKEYKCKVSN | | TAVYYC | | SSLQP | DFTLT | KADYE |
| | ARGRGG | KALPAPIEKTISK | | ARDRPY | | EDFAT | ISSLQ | KHKVY |
| | SGWLDY | AKGQPREPQVYTL | | YYYMDV | | YYCQQ | AEDVA | ACEVT |
| | WGQGTL | PPSREEMTKNQVS | | WGKGTT | | YKSYP | VYYCQ | HQGLS |
| | VTVSS | LTCLVKGFYPSDI | | VTVSS | | VTFGQ | QYYTT | SPVTK |
| | (SEQ | AVEWESNGQPENN | | (SEQ | | GTKVE | PPTFG | SFNRG |
| | ID NO: | YKTTPPVLDSDGS | | ID NO: | | IK | QGTRL | EC |
| | 1438) | FFLYSKLTVDKSR | | 1460) | | (SEQ | EIK | (SEQ |
| | | WQQGNVFSCSVMH | | | | ID | (SEQ | ID |
| | | EALHNHYTQKSLS | | | | NO: | ID | NO: |
| | | LSPG (SEQ ID | | | | 592) | NO: | 45) |
| | | NO: 44) | | | | | 1359) | |
| PMAB | EVQLLE | ASTKGPSVFPLAP | GGGGSG | EVQLLE | GGGGSG | DIQMT | DIVMT | RTVAA |
| 32 | SGGGLV | SSKSTSGGTAALG | GGGSGG | SGGGLV | GGGSGG | QSPSS | QSPDS | PSVFI |
| | QPGGSL | CLVKDYFPEPVTV | GGS | QPGGSL | GGSGGG | LSASV | LAVSL | FPPSD |
| | RLSCAA | SWNSGALTSGVHT | (SEQ | RLSCAA | GS | GDRVT | GERAT | EQLKS |
| | SGFTFS | FPAVLQSSGLYSL | ID NO: | SGFTFS | (SEQ | ITCRA | INCKS | GTASV |
| | NSDMSW | SSVVTVPSSSLGT | 30) | DFWMHW | ID NO: | SQSVS | SQSVL | VCLLN |
| | VRQAPG | QTYICNVNHKPSN | | VRQAPG | 22) | RSLAW | YSPNN | NFYPR |
| | KGLEWV | TKVDKKVEPKSCD | | KGLEWI | | YQQKP | KNYLA | EAKVQ |
| | SGITIS | KTHTCPPCPAPEA | | SYISGD | | GKAPK | WYQQK | WKVDN |
| | GGSTYY | AGAPSVFLFPPKP | | SGYTNY | | LLIYA | PGQPP | ALQSG |
| | ADSVKG | KDTLMISRTPEVT | | ADSVKG | | ASSLQ | KLLIY | NSQES |
| | RFTISR | CVVVDVSHEDPEV | | RFTISR | | SGVPS | WASTR | VTEQD |
| | DNSKNT | KFNWYVDGVEVHN | | DQSKNT | | RFSGS | ESGVP | SKDST |
| | LYLQMN | AKTKPREEQYNST | | LYLQMN | | GSGTD | DRFSG | YSLSS |
| | SLRAED | YRVVSVLTVLHQD | | SLRAED | | FTLTI | SGSGT | TLTLS |
| | TAVYYC | WLNGKEYKCKVSN | | TAVYYC | | SSLQP | DFTLT | KADYE |
| | ARGRGG | KALPAPIEKTISK | | ARDRPY | | EDFAT | ISSLQ | KHKVY |
| | SGWLDY | AKGQPREPQVYTL | | YYYMDV | | YYCQQ | AEDVA | ACEVT |
| | WGQGTL | PPSREEMTKNQVS | | WGKGTT | | YKSYP | VYYCQ | HQGLS |
| | VTVSS | LTCLVKGFYPSDI | | VTVSS | | VTFGQ | QYYTT | SPVTK |
| | (SEQ | AVEWESNGQPENN | | (SEQ | | GTKVE | PPTFG | SFNRG |
| | ID NO: | YKTTPPVLDSDGS | | ID NO: | | IK | QGTRL | EC |
| | 1438) | FFLYSKLTVDKSR | | 1379) | | (SEQ | EIK | (SEQ |
| | | WQQGNVFSCSVMH | | | | ID | (SEQ | ID |
| | | EALHNHYTQKSLS | | | | NO: | ID | NO: |
| | | LSPG (SEQ ID | | | | 592) | NO: | 45) |
| | | NO: 44) | | | | | 1359) | |
| PMAB | EVQLLE | ASTKGPSVFPLAP | GGGGSG | EVQLLE | GGGGSG | DIQMT | DIVMT | RTVAA |
| 33 | SGGGLV | SSKSTSGGTAALG | GGGSGG | SGGGLV | GGGSGG | QSPSS | QSPDS | PSVFI |
| | QPGGSL | CLVKDYFPEPVTV | GGS | QPGGSL | GGSGGG | LSASV | LAVSL | FPPSD |
| | RLSCAA | SWNSGALTSGVHT | (SEQ | RLSCAA | GS | GDRVT | GERAT | EQLKS |
| | SGFTFS | FPAVLQSSGLYSL | ID NO: | SGFTFS | (SEQ | ITCRA | INCKS | GTASV |
| | NSDMSW | SSVVTVPSSSLGT | 30) | DFWMHW | ID NO: | SQSVS | SQSVL | VCLLN |
| | VRQAPG | QTYICNVNHKPSN | | VRQAPG | 22) | RSLAW | YSPNN | NFYPR |
| | KGLEWV | TKVDKKVEPKSCD | | KGLEWI | | YQQKP | KNYLA | EAKVQ |
| | SGITIS | KTHTCPPCPAPEA | | SYISGD | | GKAPK | WYQQK | WKVDN |
| | GGSTYY | AGAPSVFLFPPKP | | SGYTNY | | LLIYA | PGQPP | ALQSG |
| | ADSVKG | KDTLMISRTPEVT | | ADSVKG | | ASSLQ | KLLIY | NSQES |
| | RFTISR | CVVVDVSHEDPEV | | RFTISR | | SGVPS | WASTR | VTEQD |
| | DNSKNT | KFNWYVDGVEVHN | | DNSKNT | | RFSGS | ESGVP | SKDST |
| | LYLQMN | AKTKPREEQYNST | | LYLQMA | | GSGTD | DRFSG | YSLSS |
| | SLRAED | YRVVSVLTVLHQD | | SLRAED | | FTLTI | SGSGT | TLTLS |
| | TAVYYC | WLNGKEYKCKVSN | | TAVYYC | | SSLQP | DFTLT | KADYE |
| | ARGRGG | KALPAPIEKTISK | | ARDRPY | | EDFAT | ISSLQ | KHKVY |
| | SGWLDY | AKGQPREPQVYTL | | YYYMDV | | YYCQQ | AEDVA | ACEVT |
| | WGQGTL | PPSREEMTKNQVS | | WGKGTT | | YKSYP | VYYCQ | HQGLS |
| | VTVSS | LTCLVKGFYPSDI | | VTVSS | | VTFGQ | QYYTT | SPVTK |
| | (SEQ | AVEWESNGQPENN | | (SEQ | | GTKVE | PPTFG | SFNRG |
| | ID NO: | YKTTPPVLDSDGS | | ID NO: | | IK | QGTRL | EC |
| | 1438) | FFLYSKLTVDKSR | | 1461) | | (SEQ | EIK | (SEQ |
| | | WQQGNVFSCSVMH | | | | ID | (SEQ | ID |
| | | EALHNHYTQKSLS | | | | NO: | ID | NO: |
| | | LSPG (SEQ ID | | | | 592) | NO: | 45) |
| | | NO: 44) | | | | | 1359) | |
| PMAB | EVQLLE | ASTKGPSVFPLAP | GGGGSG | EVQLLE | GGGGSG | DIQMT | DIVMT | RTVAA |
| 34 | SGGGLV | SSKSTSGGTAALG | GGGSGG | SGGGLV | GGGSGG | QSPSS | QSPDS | PSVFI |
| | QPGGSL | CLVKDYFPEPVTV | GGS | QPGGSL | GGSGGG | LSASV | LAVSL | FPPSD |
| | RLSCAA | SWNSGALTSGVHT | (SEQ | RLSCAA | GS | GDRVT | GERAT | EQLKS |
| | SGFTFS | FPAVLQSSGLYSL | ID NO: | SGFTFS | (SEQ | ITCRA | INCKS | GTASV |
| | NSDMSW | SSVVTVPSSSLGT | 30) | DFWMHW | ID NO: | SQSVS | SQSVL | VCLLN |
| | VRQAPG | QTYICNVNHKPSN | | VRQAPG | 22) | RSLAW | YSPNN | NFYPR |
| | KGLEWV | TKVDKKVEPKSCD | | KGLEWI | | YQQKP | KNYLA | EAKVQ |
| | SGITIS | KTHTCPPCPAPEA | | SYISGD | | GKAPK | WYQQK | WKVDN |
| | GGSTYY | AGAPSVFLFPPKP | | SGYTNY | | LLIYA | PGQPP | ALQSG |
| | ADSVKG | KDTLMISRTPEVT | | ADSVKG | | ASSLQ | KLLIY | NSQES |
| | RFTISR | CVVVDVSHEDPEV | | RFTISR | | SGVPS | WASTR | VTEQD |
| | DNSKNT | KFNWYVDGVEVHN | | DNSKNT | | RFSGS | ESGVP | SKDST |
| | LYLQMN | AKTKPREEQYNST | | LYLQMG | | GSGTD | DRFSG | YSLSS |
| | SLRAED | YRVVSVLTVLHQD | | SLRAED | | FTLTI | SGSGT | TLTLS |
| | TAVYYC | WLNGKEYKCKVSN | | TAVYYC | | SSLQP | DFTLT | KADYE |
| | ARGRGG | KALPAPIEKTISK | | ARDRPY | | EDFAT | ISSLQ | KHKVY |
| | SGWLDY | AKGQPREPQVYTL | | YYYMDV | | YYCQQ | AEDVA | ACEVT |
| | WGQGTL | PPSREEMTKNQVS | | WGKGTT | | YKSYP | VYYCQ | HQGLS |
| | VTVSS | LTCLVKGFYPSDI | | VTVSS | | VTFGQ | QYYTT | SPVTK |
| | (SEQ | AVEWESNGQPENN | | (SEQ | | GTKVE | PPTFG | SFNRG |
| | ID NO: | YKTTPPVLDSDGS | | ID NO: | | IK | QGTRL | EC |
| | 1438) | FFLYSKLTVDKSR | | 1462) | | (SEQ | EIK | (SEQ |
| | | WQQGNVFSCSVMH | | | | ID | (SEQ | ID |
| | | EALHNHYTQKSLS | | | | NO: | ID | NO: |
| | | LSPG (SEQ ID | | | | 592) | NO: | 45) |
| | | NO: 44) | | | | | 1359) | |
| PMAB | EVQLLE | ASTKGPSVFPLAP | GGGGSG | EVQLLE | GGGGSG | DIQMT | DIVMT | RTVAA |
| 35 | SGGGLV | SSKSTSGGTAALG | GGGSGG | SGGGLV | GGGSGG | QSPSS | QSPDS | PSVFI |
| | QPGGSL | CLVKDYFPEPVTV | GGS | QPGGSL | GGSGGG | LSASV | LAVSL | FPPSD |
| | RLSCAA | SWNSGALTSGVHT | (SEQ | RLSCAA | GS | GDRVT | GERAT | EQLKS |
| | SGFTFS | FPAVLQSSGLYSL | ID NO: | SGFTFS | (SEQ | ITCRA | INCKS | GTASV |
| | NSDMSW | SSVVTVPSSSLGT | 30) | DFWMHW | ID NO: | SQSVS | SQSVL | VCLLN |
| | VRQAPG | QTYICNVNHKPSN | | VRQAPG | 22) | RSLAW | YSPNN | NFYPR |
| | KGLEWV | TKVDKKVEPKSCD | | KGLEWI | | YQQKP | KNYLA | EAKVQ |
| | SGITIS | KTHTCPPCPAPEA | | SYISGD | | GKAPK | WYQQK | WKVDN |
| | GGSTYY | AGAPSVFLFPPKP | | SGYTNY | | LLIYA | PGQPP | ALQSG |
| | ADSVKG | KDTLMISRTPEVT | | ADSVKG | | ASSLQ | KLLIY | NSQES |
| | RFTISR | CVVVDVSHEDPEV | | RFTISR | | SGVPS | WASTR | VTEQD |
| | DNSKNT | KFNWYVDGVEVHN | | DNSKNT | | RFSGS | ESGVP | SKDST |
| | LYLQMN | AKTKPREEQYNST | | LYLQMQ | | GSGTD | DRFSG | YSLSS |
| | SLRAED | YRVVSVLTVLHQD | | SLRAED | | FTLTI | SGSGT | TLTLS |
| | TAVYYC | WLNGKEYKCKVSN | | TAVYYC | | SSLQP | DFTLT | KADYE |
| | ARGRGG | KALPAPIEKTISK | | ARDRPY | | EDFAT | ISSLQ | KHKVY |
| | SGWLDY | AKGQPREPQVYTL | | YYYMDV | | YYCQQ | AEDVA | ACEVT |
| | WGQGTL | PPSREEMTKNQVS | | WGKGTT | | YKSYP | VYYCQ | HQGLS |
| | VTVSS | LTCLVKGFYPSDI | | VTVSS | | VTFGQ | QYYTT | SPVTK |
| | (SEQ | AVEWESNGQPENN | | (SEQ | | GTKVE | PPTFG | SFNRG |
| | ID NO: | YKTTPPVLDSDGS | | ID NO: | | IK | QGTRL | EC |
| | 1438) | FFLYSKLTVDKSR | | 1463) | | (SEQ | EIK | (SEQ |
| | | WQQGNVFSCSVMH | | | | ID | (SEQ | ID |
| | | EALHNHYTQKSLS | | | | NO: | ID | NO: |
| | | LSPG (SEQ ID | | | | 592) | NO: | 45) |
| | | NO: 44) | | | | | 1359) | |
| PMAB | EVQLLE | ASTKGPSVFPLAP | GGGGSG | EVQLLE | GGGGSG | DIQMT | DIVMT | RTVAA |
| 36 | SGGGLV | SSKSTSGGTAALG | GGGSGG | SGGGLV | GGGSGG | QSPSS | QSPDS | PSVFI |
| | QPGGSL | CLVKDYFPEPVTV | GGS | QPGGSL | GGSGGG | LSASV | LAVSL | FPPSD |
| | RLSCAA | SWNSGALTSGVHT | (SEQ | RLSCAA | GS | GDRVT | GERAT | EQLKS |
| | SGFTFS | FPAVLQSSGLYSL | ID NO: | SGFTFS | (SEQ | ITCRA | INCKS | GTASV |
| | NSDMSW | SSVVTVPSSSLGT | 30) | DFWMHW | ID NO: | SQSIS | SQSVL | VCLLN |
| | VRQAPG | QTYICNVNHKPSN | | VRQAPG | 22) | RSLAW | YSPNN | NFYPR |
| | KGLEWV | TKVDKKVEPKSCD | | KGLEWI | | YQQKP | KNYLA | EAKVQ |
| | SGITIS | KTHTCPPCPAPEA | | SYISGD | | GKAPK | WYQQK | WKVDN |
| | GGSTYY | AGAPSVFLFPPKP | | SGYTNY | | LLIYA | PGQPP | ALQSG |
| | ADSVKG | KDTLMISRTPEVT | | ADSVKG | | ASSLQ | KLLIY | NSQES |
| | RFTISR | CVVVDVSHEDPEV | | RFTISR | | SGVPS | WASTR | VTEQD |
| | DNSKNT | KFNWYVDGVEVHN | | DNSKNT | | RFSGS | ESGVP | SKDST |
| | LYLQMN | AKTKPREEQYNST | | LYLQMN | | GSGTD | DRFSG | YSLSS |
| | SLRAED | YRVVSVLTVLHQD | | SLRAED | | FTLTI | SGSGT | TLTLS |
| | TAVYYC | WLNGKEYKCKVSN | | TAVYYC | | SSLQP | DFTLT | KADYE |
| | ARGRGG | KALPAPIEKTISK | | ARDRPY | | EDFAT | ISSLQ | KHKVY |
| | SGWLDY | AKGQPREPQVYTL | | YYYMDV | | YYCQQ | AEDVA | ACEVT |
| | WGQGTL | PPSREEMTKNQVS | | WGKGTT | | YKSYP | VYYCQ | HQGLS |
| | VTVSS | LTCLVKGFYPSDI | | VTVSS | | VTFGQ | QYYTT | SPVTK |
| | (SEQ | AVEWESNGQPENN | | (SEQ | | GTKVE | PPTFG | SFNRG |
| | ID NO: | YKTTPPVLDSDGS | | ID NO: | | IK | QGTRL | EC |
| | 1438) | FFLYSKLTVDKSR | | 591) | | (SEQ | EIK | (SEQ |
| | | WQQGNVFSCSVMH | | | | ID | (SEQ | ID |
| | | EALHNHYTQKSLS | | | | NO: | ID | NO: |
| | | LSPG (SEQ ID | | | | 1363) | NO: | 45) |
| | | NO: 44) | | | | | 1359) | |
| PMAB | EVQLLE | ASTKGPSVFPLAP | GGGGSG | EVQLLE | GGGGSG | DIQMT | DIVMT | RTVAA |
| 37 | SGGGLV | SSKSTSGGTAALG | GGGSGG | SGGGLV | GGGSGG | QSPSS | QSPDS | PSVFI |
| | QPGGSL | CLVKDYFPEPVTV | GGS | QPGGSL | GGSGGG | LSASV | LAVSL | FPPSD |
| | RLSCAA | SWNSGALTSGVHT | (SEQ | RLSCAA | GS | GDRVT | GERAT | EQLKS |
| | SGFTFS | FPAVLQSSGLYSL | ID NO: | SGFTFS | (SEQ | ITCRA | INCKS | GTASV |
| | NSDMSW | SSVVTVPSSSLGT | 30) | DFWMHW | ID NO: | SQSVS | SQSVL | VCLLN |
| | VRQAPG | QTYICNVNHKPSN | | VRQAPG | 22) | SSLAW | YSPNN | NFYPR |
| | KGLEWV | TKVDKKVEPKSCD | | KGLEWI | | YQQKP | KNYLA | EAKVQ |
| | SGITIS | KTHTCPPCPAPEA | | SYISGD | | GKAPK | WYQQK | WKVDN |
| | GGSTYY | AGAPSVFLFPPKP | | SGYTNY | | LLIYA | PGQPP | ALQSG |
| | ADSVKG | KDTLMISRTPEVT | | ADSVKG | | ASSLQ | KLLIY | NSQES |
| | RFTISR | CVVVDVSHEDPEV | | RFTISR | | SGVPS | WASTR | VTEQD |
| | DNSKNT | KFNWYVDGVEVHN | | DNSKNT | | RFSGS | ESGVP | SKDST |
| | LYLQMN | AKTKPREEQYNST | | LYLQMN | | GSGTD | DRFSG | YSLSS |
| | SLRAED | YRVVSVLTVLHQD | | SLRAED | | FTLTI | SGSGT | TLTLS |
| | TAVYYC | WLNGKEYKCKVSN | | TAVYYC | | SSLQP | DFTLT | KADYE |
| | ARGRGG | KALPAPIEKTISK | | ARDRPY | | EDFAT | ISSLQ | KHKVY |
| | SGWLDY | AKGQPREPQVYTL | | YYYMDV | | YYCQQ | AEDVA | ACEVT |
| | WGQGTL | PPSREEMTKNQVS | | WGKGTT | | YKSYP | VYYCQ | HQGLS |
| | VTVSS | LTCLVKGFYPSDI | | VTVSS | | VTFGç | QYYTT | SPVTK |
| | SEQ | AVEWESNGQPENN | | (SEQ | | GTKVE | PPTFG | SFNRG |
| | ID NO: | YKTTPPVLDSDGS | | ID NO: | | IK | QGTRL | EC |
| | 1438) | FFLYSKLTVDKSR | | 591) | | (SEQ | EIK | (SEQ |
| | | WQQGNVFSCSVMH | | | | ID | (SEQ | ID |
| | | EALHNHYTQKSLS | | | | NO: | ID | NO: |
| | | LSPG (SEQ ID | | | | 1364) | NO: | 45) |
| | | NO: 44) | | | | | 1359) | |
| PMAB | EVQLLE | ASTKGPSVFPLAP | GGGGSG | EVQLLE | GGGGSG | DIQMT | DIVMT | RTVAA |
| 38 | SGGGLV | SSKSTSGGTAALG | GGGSGG | SGGGLV | GGGSGG | QSPSS | QSPDS | PSVFI |
| | QPGGSL | CLVKDYFPEPVTV | GGS | QPGGSL | GGSGGG | LSASV | LAVSL | FPPSD |
| | RLSCAA | SWNSGALTSGVHT | (SEQ | RLSCAA | GS | GDRVT | GERAT | EQLKS |
| | SGFTFS | FPAVLQSSGLYSL | ID NO: | SGFTFS | (SEQ | ITCRA | INCKS | GTASV |
| | NSDMSW | SSVVTVPSSSLGT | 30) | DFWMHW | ID NO: | SQSVS | SQSVL | VCLLN |
| | VRQAPG | QTYICNVNHKPSN | | VRQAPG | 22) | RYLAW | YSPNN | NFYPR |
| | KGLEWV | TKVDKKVEPKSCD | | KGLEWI | | YQQKP | KNYLA | EAKVQ |
| | SGITIS | KTHTCPPCPAPEA | | SYISGD | | GKAPK | WYQQK | WKVDN |
| | GGSTYY | AGAPSVFLFPPKP | | SGYTNY | | LLIYA | PGQPP | ALQSG |
| | ADSVKG | KDTLMISRTPEVT | | ADSVKG | | ASSLQ | KLLIY | NSQES |
| | RFTISR | CVVVDVSHEDPEV | | RFTISR | | SGVPS | WASTR | VTEQD |
| | DNSKNT | KFNWYVDGVEVHN | | DNSKNT | | RFSGS | ESGVP | SKDST |
| | LYLQMN | AKTKPREEQYNST | | LYLQMN | | GSGTD | DRFSG | YSLSS |
| | SLRAED | YRVVSVLTVLHQD | | SLRAED | | FTLTI | SGSGT | TLTLS |
| | TAVYYC | WLNGKEYKCKVSN | | TAVYYC | | SSLQP | DFTLT | KADYE |
| | ARGRGG | KALPAPIEKTISK | | ARDRPY | | EDFAT | ISSLQ | KHKVY |
| | SGWLDY | AKGQPREPQVYTL | | YYYMDV | | YYCQQ | AEDVA | ACEVT |
| | WGQGTL | PPSREEMTKNQVS | | WGKGTT | | YKSYP | VYYCQ | HQGLS |
| | VTVSS | LTCLVKGFYPSDI | | VTVSS | | VTFGQ | QYYTT | SPVTK |
| | (SEQ | AVEWESNGQPENN | | (SEQ | | GTKVE | PPTFG | SFNRG |
| | ID NO: | YKTTPPVLDSDGS | | ID NO: | | IK | QGTRL | EC |
| | 1438) | FFLYSKLTVDKSR | | 591) | | (SEQ | EIK | (SEQ |
| | | WQQGNVFSCSVMH | | | | ID | (SEQ | ID |
| | | EALHNHYTQKSLS | | | | NO: | ID | NO: |
| | | LSPG (SEQ ID | | | | 1365) | NO: | 45) |
| | | NO: 44) | | | | | 1359) | |
| PMAB | EVQLLE | ASTKGPSVFPLAP | GGGGSG | EVQLLE | GGGGSG | DIQMT | DIVMT | RTVAA |
| 39 | SGGGLV | SSKSTSGGTAALG | GGGSGG | SGGGLV | GGGSGG | QSPSS | QSPDS | PSVFI |
| | QPGGSL | CLVKDYFPEPVTV | GGS | QPGGSL | GGSGGG | LSASV | LAVSL | FPPSD |
| | RLSCAA | SWNSGALTSGVHT | (SEQ | RLSCAA | GS | GDRVT | GERAT | EQLKS |
| | SGFTFS | FPAVLQSSGLYSL | ID NO: | SGFTFS | (SEQ | ITCRA | INCKS | GTASV |
| | NSDMSW | SSVVTVPSSSLGT | 30) | DFWMHW | ID NO: | SQSVS | SQSVL | VCLLN |
| | VRQAPG | QTYICNVNHKPSN | | VRQAPG | 22) | RSLNW | YSPNN | NFYPR |
| | KGLEWV | TKVDKKVEPKSCD | | KGLEWI | | YQQKP | KNYLA | EAKVQ |
| | SGITIS | KTHTCPPCPAPEA | | SYISGD | | GKAPK | WYQQK | WKVDN |
| | GGSTYY | AGAPSVFLFPPKP | | SGYTNY | | LLIYA | PGQPP | ALQSG |
| | ADSVKG | KDTLMISRTPEVT | | ADSVKG | | ASSLQ | KLLIY | NSQES |
| | RFTISR | CVVVDVSHEDPEV | | RFTISR | | SGVPS | WASTR | VTEQD |
| | DNSKNT | KFNWYVDGVEVHN | | DNSKNT | | RFSGS | ESGVP | SKDST |
| | LYLQMN | AKTKPREEQYNST | | LYLQMN | | GSGTD | DRFSG | YSLSS |
| | SLRAED | YRVVSVLTVLHQD | | SLRAED | | FTLTI | SGSGT | TLTLS |
| | TAVYYC | WLNGKEYKCKVSN | | TAVYYC | | SSLQP | DFTLT | KADYE |
| | ARGRGG | KALPAPIEKTISK | | ARDRPY | | EDFAT | ISSLQ | KHKVY |
| | SGWLDY | AKGQPREPQVYTL | | YYYMDV | | YYCQQ | AEDVA | ACEVT |
| | WGQGTL | PPSREEMTKNQVS | | WGKGTT | | YKSYP | VYYCQ | HQGLS |
| | VTVSS | LTCLVKGFYPSDI | | VTVSS | | VTFGQ | QYYTT | SPVTK |
| | (SEQ | AVEWESNGQPENN | | (SEQ | | GTKVE | PPTFG | SFNRG |
| | ID NO: | YKTTPPVLDSDGS | | ID NO: | | IK | QGTRL | EC |
| | 1438) | FFLYSKLTVDKSR | | 591) | | (SEQ | EIK | (SEQ |
| | | WQQGNVFSCSVMH | | | | ID | (SEQ | ID |
| | | EALHNHYTQKSLS | | | | NO: | ID | NO: |
| | | LSPG (SEQ ID | | | | 1366) | NO: | 45) |
| | | NO: 44) | | | | | 1359) | |
| PMAB | EVQLLE | ASTKGPSVFPLAP | GGGGSG | EVQLLE | GGGGSG | DIQMT | DIVMT | RTVAA |
| 40 | SGGGLV | SSKSTSGGTAALG | GGGSGG | SGGGLV | GGGSGG | QSPSS | QSPDS | PSVFI |
| | QPGGSL | CLVKDYFPEPVTV | GGS | QPGGSL | GGSGGG | LSASV | LAVSL | FPPSD |
| | RLSCAA | SWNSGALTSGVHT | (SEQ | RLSCAA | GS | GDRVT | GERAT | EQLKS |
| | SGFTFS | FPAVLQSSGLYSL | ID NO: | SGFTFS | (SEQ | ITCRA | INCKS | GTASV |
| | NSDMSW | SSVVTVPSSSLGT | 30) | DFWMHW | ID NO: | SQSVS | SQSVL | VCLLN |
| | VRQAPG | QTYICNVNHKPSN | | VRQAPG | 22) | RSLAW | YSPNN | NFYPR |
| | KGLEWV | TKVDKKVEPKSCD | | KGLEWI | | YQQKP | KNYLA | EAKVQ |
| | SGITIS | KTHTCPPCPAPEA | | SYISGD | | GKAPK | WYQQK | WKVDN |
| | GGSTYY | AGAPSVFLFPPKP | | SGYTNY | | LLIYA | PGQPP | ALQSG |
| | ADSVKG | KDTLMISRTPEVT | | ADSVKG | | ASSLQ | KLLIY | NSQES |
| | RFTISR | CVVVDVSHEDPEV | | RFTISR | | SGVPS | WASTR | VTEQD |
| | DNSKNT | KFNWYVDGVEVHN | | DNSKNT | | RFSGS | ESGVP | SKDST |
| | LYLQMN | AKTKPREEQYNST | | LYLQMN | | GSGTD | DRFSG | YSLSS |
| | SLRAED | YRVVSVLTVLHQD | | SLRAED | | FTLTI | SGSGT | TLTLS |
| | TAVYYC | WLNGKEYKCKVSN | | TAVYYC | | SSLQP | DFTLT | KADYE |
| | ARGRGG | KALPAPIEKTISK | | ARDRPY | | EDFAT | ISSLQ | KHKVY |
| | SGWLDY | AKGQPREPQVYTL | | YYYMDV | | YYCQQ | AEDVA | ACEVT |
| | WGQGTL | PPSREEMTKNQVS | | WGKGTT | | SKSYP | VYYCQ | HQGLS |
| | VTVSS | LTCLVKGFYPSDI | | VTVSS | | VTFGQ | QYYTT | SPVTK |
| | (SEQ | AVEWESNGQPENN | | (SEQ | | GTKVE | PPTFG | SFNRG |
| | ID NO: | YKTTPPVLDSDGS | | ID NO: | | IK | QGTRL | EC |
| | 1438) | FFLYSKLTVDKSR | | 591) | | (SEQ | EIK | (SEQ |
| | | WQQGNVFSCSVMH | | | | ID | (SEQ | ID |
| | | EALHNHYTQKSLS | | | | NO: | ID | NO: |
| | | LSPG (SEQ ID | | | | 1464) | NO: | 45) |
| | | NO: 44) | | | | | 1359) | |
| PMAB | EVQLLE | ASTKGPSVFPLAP | GGGGSG | EVQLLE | GGGGSG | DIQMT | DIVMT | RTVAA |
| 41 | SGGGLV | SSKSTSGGTAALG | GGGSGG | SGGGLV | GGGSGG | QSPSS | QSPDS | PSVFI |
| | QPGGSL | CLVKDYFPEPVTV | GGS | QPGGSL | GGSGGG | LSASV | LAVSL | FPPSD |
| | RLSCAA | SWNSGALTSGVHT | (SEQ | RLSCAA | GS | GDRVT | GERAT | EQLKS |
| | SGFTFS | FPAVLQSSGLYSL | ID NO: | SGFTFS | (SEQ | ITCRA | INCKS | GTASV |
| | NSDMSW | SSVVTVPSSSLGT | 30) | DFWMHW | ID NO: | SQSVS | SQSVL | VCLLN |
| | VRQAPG | QTYICNVNHKPSN | | VRQAPG | 22) | RSLAW | YSPNN | NFYPR |
| | KGLEWV | TKVDKKVEPKSCD | | KGLEWI | | YQQKP | KNYLA | EAKVQ |
| | SGITIS | KTHTCPPCPAPEA | | SYISGD | | GKAPK | WYQQK | WKVDN |
| | GGSTYY | AGAPSVFLFPPKP | | SGYTNY | | LLIYA | PGQPP | ALQSG |
| | ADSVKG | KDTLMISRTPEVT | | ADSVKG | | ASSLQ | KLLIY | NSQES |
| | RFTISR | CVVVDVSHEDPEV | | RFTISR | | SGVPS | WASTR | VTEQD |
| | DNSKNT | KFNWYVDGVEVHN | | DNSKNT | | RFSGS | ESGVP | SKDST |
| | LYLQMN | AKTKPREEQYNST | | LYLQMN | | GSGTD | DRFSG | YSLSS |
| | SLRAED | YRVVSVLTVLHQD | | SLRAED | | FTLTI | SGSGT | TLTLS |
| | TAVYYC | WLNGKEYKCKVSN | | TAVYYC | | SSLQP | DFTLT | KADYE |
| | ARGRGG | KALPAPIEKTISK | | ARDRPY | | EDFAT | ISSLQ | KHKVY |
| | SGWLDY | AKGQPREPQVYTL | | YYYMDV | | YYCQQ | AEDVA | ACEVT |
| | WGQGTL | PPSREEMTKNQVS | | WGKGTT | | YYSYP | VYYCQ | HQGLS |
| | VTVSS | LTCLVKGFYPSDI | | VTVSS | | VTFGQ | QYYTT | SPVTK |
| | (SEQ | AVEWESNGQPENN | | (SEQ | | GTKVE | PPTFG | SFNRG |
| | ID NO: | YKTTPPVLDSDGS | | ID NO: | | IK | QGTRL | EC |
| | 1438) | FFLYSKLTVDKSR | | 591) | | (SEQ | EIK | (SEQ |
| | | WQQGNVFSCSVMH | | | | ID | (SEQ | ID |
| | | EALHNHYTQKSLS | | | | NO: | ID | NO: |
| | | LSPG (SEQ ID | | | | 1465) | NO: | 45) |
| | | NO: 44) | | | | | 1359) | |
| PMAB | EVQLLE | ASTKGPSVFPLAP | GGGGSG | EVQLLE | GGGGSG | DIQMT | DIVMT | RTVAA |
| 42 | SGGGLV | SSKSTSGGTAALG | GGGSGG | SGGGLV | GGGSGG | QSPSS | QSPDS | PSVFI |
| | QPGGSL | CLVKDYFPEPVTV | GGS | QPGGSL | GGSGGG | LSASV | LAVSL | FPPSD |
| | RLSCAA | SWNSGALTSGVHT | (SEQ | RLSCAA | GS | GDRVT | GERAT | EQLKS |
| | SGFTFS | FPAVLQSSGLYSL | ID NO: | SGFTFS | (SEQ | ITCRA | INCKS | GTASV |
| | NSDMSW | SSVVTVPSSSLGT | 30) | DFWMHW | ID NO: | SQSVS | SQSVL | VCLLN |
| | VRQAPG | QTYICNVNHKPSN | | VRQAPG | 22) | RSLAW | YSPNN | NFYPR |
| | KGLEWV | TKVDKKVEPKSCD | | KGLEWI | | YQQKP | KNYLA | EAKVQ |
| | SGITIS | KTHTCPPCPAPEA | | SYISGD | | GKAPK | WYQQK | WKVDN |
| | GGSTYY | AGAPSVFLFPPKP | | SGYTNY | | LLIYA | PGQPP | ALQSG |
| | ADSVKG | KDTLMISRTPEVT | | ADSVKG | | ASSLQ | KLLIY | NSQES |
| | RFTISR | CVVVDVSHEDPEV | | RFTISR | | SGVPS | WASTR | VTEQD |
| | DNSKNT | KFNWYVDGVEVHN | | DNSKNT | | RFSGS | ESGVP | SKDST |
| | LYLQMN | AKTKPREEQYNST | | LYLQMN | | GSGTD | DRFSG | YSLSS |
| | SLRAED | YRVVSVLTVLHQD | | SLRAED | | FTLTI | SGSGT | TLTLS |
| | TAVYYC | WLNGKEYKCKVSN | | TAVYYC | | SSLQP | DFTLT | KADYE |
| | ARGRGG | KALPAPIEKTISK | | ARDRPY | | EDFAT | ISSLQ | KHKVY |
| | SGWLDY | AKGQPREPQVYTL | | YYYMDV | | YYCQQ | AEDVA | ACEVT |
| | WGQGTL | PPSREEMTKNQVS | | WGKGTT | | YKSTP | VYYCQ | H?GLS |
| | VTVSS | LTCLVKGFYPSDI | | VTVSS | | VTFGQ | QYYTT | SPVTK |
| | (SEQ | AVEWESNGQPENN | | (SEQ | | GTKVE | PPTFG | SFNRG |
| | ID NO: | YKTTPPVLDSDGS | | ID NO: | | IK | QGTRL | EC |
| | 1438) | FFLYSKLTVDKSR | | 591) | | (SEQ | EIK | (SEQ |
| | | WQQGNVFSCSVMH | | | | ID | (SEQ | ID |
| | | EALHNHYTQKSLS | | | | NO: | ID | NO: |
| | | LSPG (SEQ ID | | | | 1466) | NO: | 45) |
| | | NO: 44) | | | | | 1359) | |
| PMAB | EVQLLE | ASTKGPSVFPLAP | GGGGSG | EVQLLE | GGGGSG | DIQMT | DIVMT | RTVAA |
| 43 | SGGGLV | SSKSTSGGTAALG | GGGSGG | SGGGLV | GGGSGG | QSPSS | QSPDS | PSVFI |
| | QPGGSL | CLVKDYFPEPVTV | GGS | QPGGSL | GGSGGG | LSASV | LAVSL | FPPSD |
| | RLSCAA | SWNSGALTSGVHT | (SEQ | RLSCAA | GS | GDRVT | GERAT | EQLKS |
| | SGFTFS | FPAVLQSSGLYSL | ID NO: | SGFTFS | (SEQ | ITCRA | INCKS | GTASV |
| | NSDMSW | SSVVTVPSSSLGT | 30) | DFWMHW | ID NO: | SQSVS | SQSVL | VCLLN |
| | VRQAPG | QTYICNVNHKPSN | | VRQAPG | 22) | RSLAW | YSPNN | NFYPR |
| | KGLEWV | TKVDKKVEPKSCD | | KGLEWI | | YQQKP | KNYLA | EAKVQ |
| | SGITIS | KTHTCPPCPAPEA | | SYISGD | | GKAPK | WYQQK | WKVDN |
| | GGSTYY | AGAPSVFLFPPKP | | SGYTNY | | LLIYA | PGQPP | ALQSG |
| | ADSVKG | KDTLMISRTPEVT | | ADSVKG | | ASSLQ | KLLIY | NSQES |
| | RFTISR | CVVVDVSHEDPEV | | RFTISR | | SGVPS | WASTR | VTEQD |
| | DNSKNT | KFNWYVDGVEVHN | | DNSKNT | | RFSGS | ESGVP | SKDST |
| | LYLQMN | AKTKPREEQYNST | | LYLQMN | | GSGTD | DRFSG | YSLSS |
| | SLRAED | YRVVSVLTVLHQD | | SLRAED | | FTLTI | SGSGT | TLTLS |
| | TAVYYC | WLNGKEYKCKVSN | | TAVYYC | | SSLQP | DFTLT | KADYE |
| | ARGRGG | KALPAPIEKTISK | | ARDRPY | | EDFAT | ISSLQ | KHKVY |
| | SGWLDY | AKGQPREPQVYTL | | YYYMDV | | YYCQQ | AEDVA | ACEVT |
| | WGQGTL | PPSREEMTKNQVS | | WGKGTT | | YKSYP | VYYCQ | HQGLS |
| | VTVSS | LTCLVKGFYPSDI | | VTVSS | | RTFGQ | QYYTT | SPVTK |
| | (SEQ | AVEWESNGQPENN | | (SEQ | | GTKVE | PPTFG | SFNRG |
| | ID NO: | YKTTPPVLDSDGS | | ID NO: | | IK | QGTRL | EC |
| | 1438) | FFLYSKLTVDKSR | | 591) | | (SEQ | EIK | (SEQ |
| | | WQQGNVFSCSVMH | | | | ID | (SEQ | ID |
| | | EALHNHYTQKSLS | | | | NO: | ID | NO: |
| | | LSPG (SEQ ID | | | | 1467) | NO: | 45) |
| | | NO: 44) | | | | | 1359) | |
| PMAB | EVQLLE | ASTKGPSVFPLAP | GGGGSG | EVQLLE | GGGGSG | DIQMT | DIVMT | RTVAA |
| 44 | SGGGLV | SSKSTSGGTAALG | GGGSGG | SGGGLV | GGGSGG | QSPSS | QSPDS | PSVFI |
| | QPGGSL | CLVKDYFPEPVTV | GGS | QPGGSL | GGSGGG | LSASV | LAVSL | FPPSD |
| | RLSCAA | SWNSGALTSGVHT | (SEQ | RLSCAA | GS | GDRVT | GERAT | EQLKS |
| | SGFTFS | FPAVLQSSGLYSL | ID NO: | SGFTFS | (SEQ | ITCRA | INCKS | GTASV |
| | NSDMSW | SSVVTVPSSSLGT | 30) | DFWMHW | ID NO: | SQSVS | SQSVL | VCLLN |
| | VRQAPG | QTYICNVNHKPSN | | VRQAPG | 22) | RSLAW | YSPNN | NFYPR |
| | KGLEWV | TKVDKKVEPKSCD | | KGLEWI | | YQQKP | KNYLA | EAKVQ |
| | SGITIS | KTHTCPPCPAPEA | | SYISGD | | GKAPK | WYQQK | WKVDN |
| | GGSTYY | AGAPSVFLFPPKP | | SGYTNY | | LLIYA | PGQPP | ALQSG |
| | ADSVKG | KDTLMISRTPEVT | | ADSVKG | | ASSLQ | KLLIY | NSQES |
| | RFTISR | CVVVDVSHEDPEV | | RFTISR | | SGVPS | WASTR | VTEQD |
| | DNSKNT | KFNWYVDGVEVHN | | DNSKNT | | RFSGS | ESGVP | SKDST |
| | LYLQMN | AKTKPREEQYNST | | LYLQMN | | GSGTD | DRFSG | YSLSS |
| | SLRAED | YRVVSVLTVLHQD | | SLRAED | | FTLTI | SGSGT | TLTLS |
| | TAVYYC | WLNGKEYKCKVSN | | TAVYYC | | SSLQP | DFTLT | KADYE |
| | ARGRGG | KALPAPIEKTISK | | ARDRPT | | EDFAT | ISSLQ | KHKVY |
| | SGWLDY | AKGQPREPQVYTL | | YYYMDV | | YYCQQ | AEDVA | ACEVT |
| | WGQGTL | PPSREEMTKNQVS | | WGKGTT | | YKSYP | VYYCQ | HQGLS |
| | VTVSS | LTCLVKGFYPSDI | | VTVSS | | VTFGQ | QYYTT | SPVTK |
| | (SEQ | AVEWESNGQPENN | | (SEQ | | GTKVE | PPTFG | SFNRG |
| | ID NO: | YKTTPPVLDSDGS | | ID NO: | | IK | QGTRL | EC |
| | 1438) | FFLYSKLTVDKSR | | 1390) | | (SEQ | EIK | (SEQ |
| | | WQQGNVFSCSVMH | | | | ID | (SEQ | ID |
| | | EALHNHYTQKSLS | | | | NO: | ID | NO: |
| | | LSPG (SEQ ID | | | | 592) | NO: | 45) |
| | | NO: 44) | | | | | 1359) | |
| PMAB | EVQLLE | ASTKGPSVFPLAP | GGGGSG | EVQLLE | GGGGSG | DIQMT | DIVMT | RTVAA |
| 45 | SGGGLV | SSKSTSGGTAALG | GGGSGG | SGGGLV | GGGSGG | QSPSS | QSPDS | PSVFI |
| | QPGGSL | CLVKDYFPEPVTV | GGS | QPGGSL | GGSGGG | LSASV | LAVSL | FPPSD |
| | RLSCAA | SWNSGALTSGVHT | (SEQ | RLSCAA | GS | GDRVT | GERAT | EQLKS |
| | SGFTFS | FPAVLQSSGLYSL | ID NO: | SGFTFS | (SEQ | ITCRA | INCKS | GTASV |
| | NSDMSW | SSVVTVPSSSLGT | 30) | DFWMHW | ID NO: | SQSVS | SQSVL | VCLLN |
| | VRQAPG | QTYICNVNHKPSN | | VRQAPG | 22) | RSLAW | YSPNN | NFYPR |
| | KGLEWV | TKVDKKVEPKSCD | | KGLEWI | | YQQKP | KNYLA | EAKVQ |
| | SGITIS | KTHTCPPCPAPEA | | SYISGD | | GKAPK | WYQQK | WKVDN |
| | GGSTYY | AGAPSVFLFPPKP | | SGYTNY | | LLIYA | PGQPP | ALQSG |
| | ADSVKG | KDTLMISRTPEVT | | ADSVKG | | ASSLQ | KLLIY | NSQES |
| | RFTISR | CVVVDVSHEDPEV | | RFTISR | | SGVPS | WASTR | VTEQD |
| | DNSKNT | KFNWYVDGVEVHN | | DNSKNT | | RFSGS | ESGVP | SKDST |
| | LYLQMN | AKTKPREEQYNST | | LYLQMN | | GSGTD | DRFSG | YSLSS |
| | SLRAED | YRVVSVLTVLHQD | | SLRAED | | FTLTI | SGSGT | TLTLS |
| | TAVYYC | WLNGKEYKCKVSN | | TAVYYC | | SSLQP | DFTLT | KADYE |
| | ARGRGG | KALPAPIEKTISK | | ARDRPY | | EDFAT | ISSLQ | KHKVY |
| | SGWLDY | AKGQPREPQVYTL | | DYYMDV | | YYCQQ | AEDVA | ACEVT |
| | WGQGTL | PPSREEMTKNQVS | | WGKGTT | | YKSYP | VYYCQ | HQGLS |
| | VTVSS | LTCLVKGFYPSDI | | VTVSS | | VTFGQ | QYYTT | SPVTK |
| | (SEQ | AVEWESNGQPENN | | (SEQ | | GTKVE | PPTFG | SFNRG |
| | ID NO: | YKTTPPVLDSDGS | | ID NO: | | IK | QGTRL | EC |
| | 1438) | FFLYSKLTVDKSR | | 1468) | | (SEQ | EIK | (SEQ |
| | | WQQGNVFSCSVMH | | | | ID | (SEQ | ID |
| | | EALHNHYTQKSLS | | | | NO: | ID | NO: |
| | | LSPG (SEQ ID | | | | 592) | NO: | 45) |
| | | NO: 44) | | | | | 1359) | |
| PMAB | EVQLLE | ASTKGPSVFPLAP | GGGGSG | EVQLLE | GGGGSG | DIQMT | DIVMT | RTVAA |
| 46 | SGGGLV | SSKSTSGGTAALG | GGGSGG | SGGGLV | GGGSGG | QSPSS | QSPDS | PSVFI |
| | QPGGSL | CLVKDYFPEPVTV | GGS | QPGGSL | GGSGGG | LSASV | LAVSL | FPPSD |
| | RLSCAA | SWNSGALTSGVHT | (SEQ | RLSCAA | GS | GDRVT | GERAT | EQLKS |
| | SGFTFS | FPAVLQSSGLYSL | ID NO: | SGFTFS | (SEQ | ITCRA | INCKS | GTASV |
| | NSDMSW | SSVVTVPSSSLGT | 30) | DFWMHW | ID NO: | SQSVS | SQSVL | VCLLN |
| | VRQAPG | QTYICNVNHKPSN | | VRQAPG | 22) | RSLAW | YSPNN | NFYPR |
| | KGLEWV | TKVDKKVEPKSCD | | KGLEWI | | YQQKP | KNYLA | EAKVQ |
| | SGITIS | KTHTCPPCPAPEA | | SYISGD | | GKAPK | WYQQK | WKVDN |
| | GGSTYY | AGAPSVFLFPPKP | | SGYTNY | | LLIYA | PGQPP | ALQSG |
| | ADSVKG | KDTLMISRTPEVT | | ADSVKG | | ASSLQ | KLLIY | NSQES |
| | RFTISR | CVVVDVSHEDPEV | | RFTISR | | SGVPS | WASTR | VTEQD |
| | DNSKNT | KFNWYVDGVEVHN | | DNSKNT | | RFSGS | ESGVP | SKDST |
| | LYLQMN | AKTKPREEQYNST | | LYLQMN | | GSGTD | DRFSG | YSLSS |
| | SLRAED | YRVVSVLTVLHQD | | SLRAED | | FTLTI | SGSGT | TLTLS |
| | TAVYYC | WLNGKEYKCKVSN | | TAVYYC | | SSLQP | DFTLT | KADYE |
| | ARGRGG | KALPAPIEKTISK | | ARDRPY | | EDFAT | ISSLQ | KHKVY |
| | SGWLDY | AKGQPREPQVYTL | | GYYMDV | | YYCQQ | AEDVA | ACEVT |
| | WGQGTL | PPSREEMTKNQVS | | WGKGTT | | YKSYP | VYYCQ | HQGLS |
| | VTVSS | LTCLVKGFYPSDI | | VTVSS | | VTFGQ | QYYTT | SPVTK |
| | (SEQ | AVEWESNGQPENN | | (SEQ | | GTKVE | PPTFG | SFNRG |
| | ID NO: | YKTTPPVLDSDGS | | ID NO: | | IK | QGTRL | EC |
| | 1438) | FFLYSKLTVDKSR | | 1469) | | (SEQ | EIK | (SEQ |
| | | WQQGNVFSCSVMH | | | | ID | (SEQ | ID |
| | | EALHNHYTQKSLS | | | | NO: | ID | NO: |
| | | LSPG (SEQ ID | | | | 592) | NO: | 45) |
| | | NO: 44) | | | | | 1359) | |
| PMAB | EVQLLE | ASTKGPSVFPLAP | GGGGSG | EVQLLE | GGGGSG | DIQMT | DIVMT | RTVAA |
| 47 | SGGGLV | SSKSTSGGTAALG | GGGSGG | SGGGLV | GGGSGG | QSPSS | QSPDS | PSVFI |
| | QPGGSL | CLVKDYFPEPVTV | GGS | QPGGSL | GGSGGG | LSASV | LAVSL | FPPSD |
| | RLSCAA | SWNSGALTSGVHT | (SEQ | RLSCAA | GS | GDRVT | GERAT | EQLKS |
| | SGFTFS | FPAVLQSSGLYSL | ID NO: | SGFTFS | (SEQ | ITCRA | INCKS | GTASV |
| | NSDMSW | SSVVTVPSSSLGT | 30) | DFWMHW | ID NO: | SQSVS | SQSVL | VCLLN |
| | VRQAPG | QTYICNVNHKPSN | | VRQAPG | 22) | RSLAW | YSPNN | NFYPR |
| | KGLEWV | TKVDKKVEPKSCD | | KGLEWI | | YQQKP | KNYLA | EAKVQ |
| | SGITIS | KTHTCPPCPAPEA | | SYISGD | | GKAPK | WYQQK | WKVDN |
| | GGSTYY | AGAPSVFLFPPKP | | SGYTNY | | LLIYA | PGQPP | ALQSG |
| | ADSVKG | KDTLMISRTPEVT | | ADSVKG | | ASSLQ | KLLIY | NSQES |
| | RFTISR | CVVVDVSHEDPEV | | RFTISR | | SGVPS | WASTR | VTEQD |
| | DNSKNT | KFNWYVDGVEVHN | | DNSKNT | | RFSGS | ESGVP | SKDST |
| | LYLQMN | AKTKPREEQYNST | | LYLQMN | | GSGTD | DRFSG | YSLSS |
| | SLRAED | YRVVSVLTVLHQD | | SLRAED | | FTLTI | SGSGT | TLTLS |
| | TAVYYC | WLNGKEYKCKVSN | | TAVYYC | | SSLQP | DFTLT | KADYE |
| | ARGRGG | KALPAPIEKTISK | | ARDRPY | | EDFAT | ISSLQ | KHKVY |
| | SGWLDY | AKGQPREPQVYTL | | NYYMDV | | YYCQQ | AEDVA | ACEVT |
| | WGQGTL | PPSREEMTKNQVS | | WGKGTT | | YKSYP | VYYCQ | HQGLS |
| | VTVSS | LTCLVKGFYPSDI | | VTVSS | | VTFGQ | QYYTT | SPVTK |
| | (SEQ | AVEWESNGQPENN | | (SEQ | | GTKVE | PPTFG | SFNRG |
| | ID NO: | YKTTPPVLDSDGS | | ID NO: | | IK | QGTRL | EC |
| | 1438) | FFLYSKLTVDKSR | | 1470) | | (SEQ | EIK | (SEQ |
| | | WQQGNVFSCSVMH | | | | ID | (SEQ | ID |
| | | EALHNHYTQKSLS | | | | NO: | ID | NO: |
| | | LSPG (SEQ ID | | | | 592) | NO: | 45) |
| | | NO: 44) | | | | | 1359) | |
| PMAB | EVQLLE | ASTKGPSVFPLAP | GGGGSG | EVQLLE | GGGGSG | DIQMT | DIVMT | RTVAA |
| 48 | SGGGLV | SSKSTSGGTAALG | GGGSGG | SGGGLV | GGGSGG | QSPSS | QSPDS | PSVFI |
| | QPGGSL | CLVKDYFPEPVTV | GGS | QPGGSL | GGSGGG | LSASV | LAVSI | FPPSD |
| | RLSCAA | SWNSGALTSGVHT | (SEQ | RLSCAA | GS | GDRVT | GERAT | EQLKS |
| | SGFTFS | FPAVLQSSGLYSL | ID NO: | SGFTFS | (SEQ | ITCRA | INCKS | GTASV |
| | NSDMSW | SSVVTVPSSSLGT | 30) | DFWMHW | ID NO: | SQSVS | SQSVL | VCLLN |
| | VRQAPG | QTYICNVNHKPSN | | VRQAPG | 22) | RSLAW | YSPNN | NFYPR |
| | KGLEWV | TKVDKKVEPKSCD | | KGLEWI | | YQQKP | KNYLA | EAKVQ |
| | SGITIS | KTHTCPPCPAPEA | | SYISGD | | GKAPK | WYQQK | WKVDN |
| | GGSTYY | AGAPSVFLFPPKP | | SGYTNY | | LLIYA | PGQPP | ALQSG |
| | ADSVKG | KDTLMISRTPEVT | | ADSVKG | | ASSLQ | KLLIY | NSQES |
| | RFTISR | CVVVDVSHEDPEV | | RFTISR | | SGVPS | WASTR | VTEQD |
| | DNSKNT | KFNWYVDGVEVHN | | DNSKNT | | RFSGS | ESGVP | SKDST |
| | LYLQMN | AKTKPREEQYNST | | LYLQMN | | GSGTD | DRFSG | YSLSS |
| | SLRAED | YRVVSVLTVLHQD | | SLRAED | | FTLTI | SGSGT | TLTLS |
| | TAVYYC | WLNGKEYKCKVSN | | TAVYYC | | SSLQP | DFTLT | KADYE |
| | ARGRGG | KALPAPIEKTISK | | ARDRPY | | EDFAT | ISSLQ | KHKVY |
| | SGWLDY | AKGQPREPQVYTL | | SYYMDV | | YYCQQ | AEDVA | ACEVT |
| | WGQGTL | PPSREEMTKNQVS | | WGKGTT | | YKSYP | VYYCQ | HQGLS |
| | VTVSS | LTCLVKGFYPSDI | | VTVSS | | VTFGQ | QYYTT | SPVTK |
| | (SEQ | AVEWESNGQPENN | | (SEQ | | GTKVE | PPTFG | SFNRG |
| | ID NO: | YKTTPPVLDSDGS | | ID NO: | | IK | QGTRL | EC |
| | 1438) | FFLYSKLTVDKSR | | 1471) | | (SEQ | EIK | (SEQ |
| | | WQQGNVFSCSVMH | | | | ID | (SEQ | ID |
| | | EALHNHYTQKSLS | | | | NO: | ID | NO: |
| | | LSPG (SEQ ID | | | | 592) | NO: | 45) |
| | | NO: 44) | | | | | 1359) | |
| PMAB | EVQLLE | ASTKGPSVFPLAP | GGGGSG | EVQLLE | GGGGSG | DIQMT | DIVMT | RTVAA |
| 49 | SGGGLV | SSKSTSGGTAALG | GGGSGG | SGGGLV | GGGSGG | QSPSS | QSPDS | PSVFI |
| | QPGGSL | CLVKDYFPEPVTV | GGS | QPGGSL | GGSGGG | LSASV | LAVSL | FPPSD |
| | RLSCAA | SWNSGALTSGVHT | (SEQ | RLSCAA | GS | GDRVT | GERAT | EQLKS |
| | SGFTFS | FPAVLQSSGLYSL | ID NO: | SGFTFS | (SEQ | ITCRA | INCKS | GTASV |
| | NSDMSW | SSVVTVPSSSLGT | 30) | DFWMHW | ID NO: | SQSVS | SQSVL | VCLLN |
| | VRQAPG | QTYICNVNHKPSN | | VRQAPG | 22) | RSLAW | YSPNN | NFYPR |
| | KGLEWV | TKVDKKVEPKSCD | | KGLEWI | | YQQKP | KNYLA | EAKVQ |
| | SGITIS | KTHTCPPCPAPEA | | SYISGD | | GKAPK | WYQQK | WKVDN |
| | GGSTYY | AGAPSVFLFPPKP | | SGYTNY | | LLIYA | PGQPP | ALQSG |
| | ADSVKG | KDTLMISRTPEVT | | ADSVKG | | ASSLQ | KLLIY | NSQES |
| | RFTISR | CVVVDVSHEDPEV | | RFTISR | | SGVPS | WASTR | VTEQD |
| | DNSKNT | KFNWYVDGVEVHN | | DNSKNT | | RFSGS | ESGVP | SKDST |
| | LYLQMN | AKTKPREEQYNST | | LYLQMN | | GSGTD | DRFSG | YSLSS |
| | SLRAED | YRVVSVLTVLHQD | | SLRAED | | FTLTI | SGSGT | TLTLS |
| | TAVYYC | WLNGKEYKCKVSN | | TAVYYC | | SSLQP | DFTLT | KADYE |
| | ARGRGG | KALPAPIEKTISK | | ARDRPY | | EDFAT | ISSLQ | KHKVY |
| | SGWLDY | AKGQPREPQVYTL | | YYDMDV | | YYCQQ | AEDVA | ACEVT |
| | WGQGTL | PPSREEMTKNQVS | | WGKGTT | | YKSYP | VYYCQ | HQGLS |
| | VTVSS | LTCLVKGFYPSDI | | VTVSS | | VTFGQ | QYYTT | SPVTK |
| | (SEQ | AVEWESNGQPENN | | (SEQ | | GTKVE | PPTFG | SFNRG |
| | ID NO: | YKTTPPVLDSDGS | | ID NO: | | IK | QGTRL | EC |
| | 1438) | FFLYSKLTVDKSR | | 1472) | | (SEQ | EIK | (SEQ |
| | | WQQGNVFSCSVMH | | | | ID | (SEQ | ID |
| | | EALHNHYTQKSLS | | | | NO: | ID | NO: |
| | | LSPG (SEQ ID | | | | 592) | NO: | 45) |
| | | NO: 44) | | | | | 1359) | |
| PMAB | EVQLLE | ASTKGPSVFPLAP | GGGGSG | EVQLLE | GGGGSG | DIQMT | DIVMT | RTVAA |
| 50 | SGGGLV | SSKSTSGGTAALG | GGGSGG | SGGGLV | GGGSGG | QSPSS | QSPDS | PSVFI |
| | QPGGSL | CLVKDYFPEPVTV | GGS | QPGGSL | GGSGGG | LSASV | LAVSL | FPPSD |
| | RLSCAA | SWNSGALTSGVHT | (SEQ | RLSCAA | GS | GDRVT | GERAT | EQLKS |
| | SGFTFS | FPAVLQSSGLYSL | ID NO: | SGFTFS | (SEQ | ITCRA | INCKS | GTASV |
| | NSDMSW | SSVVTVPSSSLGT | 30) | DFWMHW | ID NO: | SQSVS | SQSVL | VCLLN |
| | VRQAPG | QTYICNVNHKPSN | | VRQAPG | 22) | RSLAW | YSPNN | NFYPR |
| | KGLEWV | TKVDKKVEPKSCD | | KGLEWI | | YQQKP | KNYLA | EAKVQ |
| | SGITIS | KTHTCPPCPAPEA | | SYISGD | | GKAPK | WYQQK | WKVDN |
| | GGSTYY | AGAPSVFLFPPKP | | SGYTNY | | LLIYA | PGQPP | ALQSG |
| | ADSVKG | KDTLMISRTPEVT | | ADSVKG | | ASSLQ | KLLIY | NSQES |
| | RFTISR | CVVVDVSHEDPEV | | RFTISR | | SGVPS | WASTR | VTEQD |
| | DNSKNT | KFNWYVDGVEVHN | | DNSKNT | | RFSGS | ESGVP | SKDST |
| | LYLQMN | AKTKPREEQYNST | | LYLQMN | | GSGTD | DRFSG | YSLSS |
| | SLRAED | YRVVSVLTVLHQD | | SLRAED | | FTLTI | SGSGT | TLTLS |
| | TAVYYC | WLNGKEYKCKVSN | | TAVYYC | | SSLQP | DFTLT | KADYE |
| | ARGRGG | KALPAPIEKTISK | | ARDRPY | | EDFAT | ISSLQ | KHKVY |
| | SGWLDY | AKGQPREPQVYTL | | YYEMDV | | YYCQQ | AEDVA | ACEVT |
| | WGQGTL | PPSREEMTKNQVS | | WGKGTT | | YKSYP | VYYCQ | HQGLS |
| | VTVSS | LTCLVKGFYPSDI | | VTVSS | | VTFGQ | QYYTT | SPVTK |
| | (SEQ | AVEWESNGQPENN | | (SEQ | | GTKVE | PPTFG | SFNRG |
| | ID NO: | YKTTPPVLDSDGS | | ID NO: | | IK | QGTRL | EC |
| | 1438) | FFLYSKLTVDKSR | | 1473) | | (SEQ | EIK | (SEQ |
| | | WQQGNVFSCSVMH | | | | ID | (SEQ | ID |
| | | EALHNHYTQKSLS | | | | NO: | ID | NO: |
| | | LSPG (SEQ ID | | | | 592) | NO: | 45) |
| | | NO: 44) | | | | | 1359) | |
| PMAB | EVQLLE | ASTKGPSVFPLAP | GGGGSG | EVQLLE | GGGGSG | DIQMT | DIVMT | RTVAA |
| 51 | SGGGLV | SSKSTSGGTAALG | GGGSGG | SGGGLV | GGGSGG | QSPSS | QSPDS | PSVFI |
| | QPGGSL | CLVKDYFPEPVTV | GGS | QPGGSL | GGSGGG | LSASV | LAVSL | FPPSD |
| | RLSCAA | SWNSGALTSGVHT | (SEQ | RLSCAA | GS | GDRVT | GERAT | EQLKS |
| | SGFTFS | FPAVLQSSGLYSL | ID NO: | SGFTFS | (SEQ | ITCRA | INCKS | GTASV |
| | NSDMSW | SSVVTVPSSSLGT | 30) | DFWMHW | ID NO: | SQSVS | SQSVL | VCLLN |
| | VRQAPG | QTYICNVNHKPSN | | VRQAPG | 22) | RSLAW | YSPNN | NFYPR |
| | KGLEWV | TKVDKKVEPKSCD | | KGLEWI | | YQQKP | KNYLA | EAKVQ |
| | SGITIS | KTHTCPPCPAPEA | | SYISGD | | GKAPK | WYQQK | WKVDN |
| | GGSTYY | AGAPSVFLFPPKP | | SGYTNY | | LLIYA | PGQPP | ALQSG |
| | ADSVKG | KDTLMISRTPEVT | | ADSVKG | | ASSLQ | KLLIY | NSQES |
| | RFTISR | CVVVDVSHEDPEV | | RFTISR | | SGVPS | WASTR | VTEQD |
| | DNSKNT | KFNWYVDGVEVHN | | DNSKNT | | RFSGS | ESGVP | SKDST |
| | LYLQMN | AKTKPREEQYNST | | LYLQMN | | GSGTD | DRFSG | YSLSS |
| | SLRAED | YRVVSVLTVLHQD | | SLRAED | | FTLTI | SGSGT | TLTLS |
| | TAVYYC | WLNGKEYKCKVSN | | TAVYYC | | SSLQP | DFTLT | KADYE |
| | ARGRGG | KALPAPIEKTISK | | ARDRPY | | EDFAT | ISSLQ | KHKVY |
| | SGWLDY | AKGQPREPQVYTL | | YYKMDV | | YYCQQ | AEDVA | ACEVT |
| | WGQGTL | PPSREEMTKNQVS | | WGKGTT | | YKSYP | VYYCQ | HQGLS |
| | VTVSS | LTCLVKGFYPSDI | | VTVSS | | VTFGQ | QYYTT | SPVTK |
| | (SEQ | AVEWESNGQPENN | | (SEQ | | GTKVE | PPTFG | SFNRG |
| | ID NO: | YKTTPPVLDSDGS | | ID NO: | | IK | QGTRL | EC |
| | 1438) | FFLYSKLTVDKSR | | 1474) | | (SEQ | EIK | (SEQ |
| | | WQQGNVFSCSVMH | | | | ID | (SEQ | ID |
| | | EALHNHYTQKSLS | | | | NO: | ID | NO: |
| | | LSPG (SEQ ID | | | | 592) | NO: | 45) |
| | | NO: 44) | | | | | 1359) | |
| PMAB | EVQLLE | ASTKGPSVFPLAP | GGGGSG | EVQLLE | GGGGSG | DIQMT | DIVMT | RTVAA |
| 52 | SGGGLV | SSKSTSGGTAALG | GGGSGG | SGGGLV | GGGSGG | QSPSS | QSPDS | PSVFI |
| | QPGGSL | CLVKDYFPEPVTV | GGS | QPGGSL | GGSGGG | LSASV | LAVSL | FPPSD |
| | RLSCAA | SWNSGALTSGVHT | (SEQ | RLSCAA | GS | GDRVT | GERAT | EQLKS |
| | SGFTFS | FPAVLQSSGLYSL | ID NO: | SGFTFS | (SEQ | ITCRA | INCKS | GTASV |
| | NSDMSW | SSVVTVPSSSLGT | 30) | DFWMHW | ID NO: | SQSVS | SQSVL | VCLLN |
| | VRQAPG | QTYICNVNHKPSN | | VRQAPG | 22) | RSLAW | YSPNN | NFYPR |
| | KGLEWV | TKVDKKVEPKSCD | | KGLEWI | | YQQKP | KNYLA | EAKVQ |
| | SGITIS | KTHTCPPCPAPEA | | SYISGD | | GKAPK | WYQQK | WKVDN |
| | GGSTYY | AGAPSVFLFPPKP | | SGYTNY | | LLIYA | PGQPP | ALQSG |
| | ADSVKG | KDTLMISRTPEVT | | ADSVKG | | ASSLQ | KLLIY | NSQES |
| | RFTISR | CVVVDVSHEDPEV | | RFTISR | | SGVPS | WASTR | VTEQD |
| | DNSKNT | KFNWYVDGVEVHN | | DNSKNT | | RFSGS | ESGVP | SKDST |
| | LYLQMN | AKTKPREEQYNST | | LYLQMN | | GSGTD | DRFSG | YSLSS |
| | SLRAED | YRVVSVLTVLHQD | | SLRAED | | FTLTI | SGSGT | TLTLS |
| | TAVYYC | WLNGKEYKCKVSN | | TAVYYC | | SSLQP | DFTLT | KADYE |
| | ARGRGG | KALPAPIEKTISK | | ARDRPY | | EDFAT | ISSLQ | KHKVY |
| | SGWLDY | AKGQPREPQVYTL | | YYSMDV | | YYCQQ | AEDVA | ACEVT |
| | WGQGTL | PPSREEMTKNQVS | | WGKGTT | | YKSYP | VYYCQ | HQGLS |
| | VTVSS | LTCLVKGFYPSDI | | VTVSS | | VTFGQ | QYYTT | SPVTK |
| | (SEQ | AVEWESNGQPENN | | (SEQ | | GTKVE | PPTFG | SFNRG |
| | ID NO: | YKTTPPVLDSDGS | | ID NO: | | IK | QGTRL | EC |
| | 1438) | FFLYSKLTVDKSR | | 1475) | | (SEQ | EIK | (SEQ |
| | | WQQGNVFSCSVMH | | | | ID | (SEQ | ID |
| | | EALHNHYTQKSLS | | | | NO: | ID | NO: |
| | | LSPG (SEQ ID | | | | 592) | NO: | 45) |
| | | NO: 44) | | | | | 1359) | |
| PMAB | EVQLLE | ASTKGPSVFPLAP | GGGGSG | EVQLLE | GGGGSG | DIQMT | DIVMT | RTVAA |
| 53 | SGGGLV | SSKSTSGGTAALG | GGGSGG | SGGGLV | GGGSGG | QSPSS | QSPDS | PSVFI |
| | QPGGSL | CLVKDYFPEPVTV | GGS | QPGGSL | GGSGGG | LSASV | LAVSL | FPPSD |
| | RLSCAA | SWNSGALTSGVHT | (SEQ | RLSCAA | GS | GDRVT | GERAT | EQLKS |
| | SGFTFS | FPAVLQSSGLYSL | ID NO: | SGFTFS | (SEQ | ITCRA | INCKS | GTASV |
| | SYDMSW | SSVVTVPSSSLGT | 30) | SYWMHW | ID NO: | SQSIS | SQSVL | VCLLN |
| | VRQAPG | QTYICNVNHKPSN | | VRQAPG | 22) | SSLAW | YSPNN | NFYPR |
| | KGLEWV | TKVDKKVEPKSCD | | KGLEWV | | YQQKP | KNYLA | EAKVQ |
| | SGITIS | KTHTCPPCPAPEA | | SYISGS | | GKAPK | WYQQK | WKVDN |
| | GGSTYY | AGAPSVFLFPPKP | | GGYTNY | | LLIYA | PGQPP | ALQSG |
| | ADSVKG | KDTLMISRTPEVT | | ADSVKG | | ASSLQ | KLLIY | NSQES |
| | RFTISR | CVVVDVSHEDPEV | | RFTISR | | SGVPS | WASTR | VTEQD |
| | DNSKNT | KFNWYVDGVEVHN | | DNSKNT | | RFSGS | ESGVP | SKDST |
| | LYLQMN | AKTKPREEQYNST | | LYLQMN | | GSGTD | DRFSG | YSLSS |
| | SLRAED | YRVVSVLTVLHQD | | SLRAED | | FTLTI | SGSGT | TLTLS |
| | TAVYYC | WLNGKEYKCKVSN | | TAVYYC | | SSLQP | DFTLT | KADYE |
| | ARGRGG | KALPAPIEKTISK | | ARDRPY | | EDFAT | ISSLQ | KHKVY |
| | SGWLDY | AKGQPREPQVYTL | | YYDIDV | | YYCQQ | AEDVA | ACEVT |
| | WGQGTT | PPSREEMTKNQVS | | WGKGTT | | YKSYP | VYYCQ | HQGLS |
| | VTVSS | LTCLVKGFYPSDI | | VTVSS | | VTFGQ | QYYTT | SPVTK |
| | (SEQ | AVEWESNGQPENN | | (SEQ | | GTKVE | PPTFG | SFNRG |
| | ID NO: | YKTTPPVLDSDGS | | ID NO: | | IK | QGTRL | EC |
| | 1476) | FFLYSKLTVDKSR | | 1477) | | (SEQ | EIK | (SEQ |
| | | WQQGNVFSCSVMH | | | | ID | (SEQ | ID |
| | | EALHNHYTQKSLS | | | | NO: | ID | NO: |
| | | LSPG (SEQ ID | | | | 1367) | NO: | 45) |
| | | NO: 44) | | | | | 1359) | |
| PMAB | EVQLVQ | ASTKGPSVFPLAP | GGGGSG | EVQLLE | GGGGSG | DIQMT | DIQMT | RTVAA |
| 54 | SGAEVK | SSKSTSGGTAALG | GGGSGG | SGGGLV | GGGSGG | QSPSS | QSPSS | PSVFI |
| | KPGASV | CLVKDYFPEPVTV | GGS | QPGGSL | GGSGGG | LSASV | LSASV | FPPSD |
| | KVSCKA | SWNSGALTSGVHT | (SEQ | RLSCAA | GS | GDRVT | GDRVT | EQLKS |
| | SGYSFT | FPAVLQSSGLYSL | ID NO: | SGFTFS | (SEQ | ITCRA | ITCRA | GTASV |
| | SYYMHW | SSVVTVPSSSLGT | 30) | SYWMHW | ID NO: | SQSIS | SQSIS | VCLLN |
| | VRQAPG | QTYICNVNHKPSN | | VRQAPG | 22) | SSLAW | SYLAW | NFYPR |
| | QGLEWM | TKVDKKVEPKSCD | | KGLEWV | | YQQKP | YQQKP | EAKVQ |
| | GIINPS | KTHTCPPCPAPEA | | SYISGS | | GKAPK | GKAPK | WKVDN |
| | GGSTSY | AGAPSVFLFPPKP | | GGYTNY | | LLIYA | LLIYA | ALQSG |
| | AQKFQG | KDTLMISRTPEVT | | ADSVKG | | ASSLQ | ASSLQ | NSQES |
| | RVTMTR | CVVVDVSHEDPEV | | RFTISR | | SGVPS | SGVPS | VTEQD |
| | DTSTST | KFNWYVDGVEVHN | | DNSKNT | | RFSGS | RFSGS | SKDST |
| | VYMELS | AKTKPREEQYNST | | LYLQMN | | GSGTD | GSGTD | YSLSS |
| | SLRSED | YRVVSVLTVLHQD | | SLRAED | | FTLTI | FTLTI | TLTLS |
| | TAVYYC | WLNGKEYKCKVSN | | TAVYYC | | SSLQP | SSLQP | KADYE |
| | ASGWVY | KALPAPIEKTISK | | ARDRPY | | EDFAT | EDFAT | KHKVY |
| | WGQGTL | AKGQPREPQVYTL | | YYDIDV | | YYCQQ | YYCQQ | ACEVT |
| | VTVSS | PPSREEMTKNQVS | | WGKGTT | | YKSYP | SYSTP | H?GLS |
| | (SEQ | LTCLVKGFYPSDI | | VTVSS | | VTFGQ | PTFGP | SPVTK |
| | ID NO: | AVEWESNGQPENN | | (SEQ | | GTKVE | GTKVD | SFNRG |
| | 1478) | YKTTPPVLDSDGS | | ID NO: | | IK | IK | EC |
| | | FFLYSKLTVDKSR | | 1477) | | (SEQ | (SEQ | (SEQ |
| | | WQQGNVFSCSVMH | | | | ID | ID | ID |
| | | EALHNHYTQKSLS | | | | NO: | NO: | NO: |
| | | LSPG (SEQ ID | | | | 1367) | 1479) | 45) |
| | | NO: 44) | | | | | | |
| PMAB | EVQLVQ | ASTKGPSVFPLAP | GGGGSG | EVQLLE | GGGGSG | DIQMT | DIQMT | RTVAA |
| 55 | SGAEVK | SSKSTSGGTAALG | GGGSGG | SGGGLV | GGGSGG | QSPSS | QSPSS | PSVFI |
| | KPGASV | CLVKDYFPEPVTV | GGS | QPGGSL | GGSGGG | LSASV | LSASV | FPPSD |
| | KVSCKA | SWNSGALTSGVHT | (SEQ | RLSCAA | GS | GDRVT | GDRVT | EQLKS |
| | SGYSFT | FPAVLQSSGLYSL | ID NO: | SGFTFS | SEQ | ITCRA | ITCRA | GTASV |
| | SYYMHW | SSVVTVPSSSLGT | 30) | SYWMHW | ID NO: | SQSIS | SQSIS | VCLLN |
| | VRQAPG | QTYICNVNHKPSN | | VRQAPG | 22) | SSLAW | SYLAW | NFYPR |
| | QGLEWM | TKVDKKVEPKSCD | | KGLEWV | | YQQKP | YQQKP | EAKVQ |
| | GIINPS | KTHTCPPCPAPEA | | SYISGS | | GKAPK | GKAPK | WKVDN |
| | GGSTSY | AGAPSVFLFPPKP | | GGYTNY | | LLIYA | LLIYA | ALQSG |
| | AQKFQG | KDTLMISRTPEVT | | ADSVKG | | ASSLQ | ASSLQ | NSQES |
| | RVTMTR | CVVVDVSHEDPEV | | RFTISR | | SGVPS | SGVPS | VTEQD |
| | DTSTST | KFNWYVDGVEVHN | | DNSKNT | | RFSGS | RFSGS | SKDST |
| | VYMELS | AKTKPREEQYNST | | LYLQMN | | GSGTD | GSGTD | YSLSS |
| | SLRSED | YRVVSVLTVLHQD | | SLRAED | | FTLTI | FTLTI | TLTLS |
| | TAVYYC | WLNGKEYKCKVSN | | TAVYYC | | SSLQP | SSLQP | KADYE |
| | ASGWVY | KALPAPIEKTISK | | ARDRPY | | EDFAT | EDFAT | KHKVY |
| | WGQGTL | AKGQPREPQVYTL | | YYDLDV | | YYCQQ | YYCQQ | ACEVT |
| | VTVSS | PPSREEMTKNQVS | | WGKGTT | | YKSYP | SYSTP | HQGLS |
| | (SEQ | LTCLVKGFYPSDI | | VTVSS | | VTFGQ | PTFGP | SPVTK |
| | ID NO: | AVEWESNGQPENN | | (SEQ | | GTKVE | GTKVD | SFNRG |
| | 1478) | YKTTPPVLDSDGS | | ID NO: | | IK | IK | EC |
| | | FFLYSKLTVDKSR | | 1480) | | (SEQ | (SEQ | (SEQ |
| | | WQQGNVFSCSVMH | | | | ID | ID | ID |
| | | EALHNHYTQKSLS | | | | NO: | NO: | NO: |
| | | LSPG (SEQ ID | | | | 1367) | 1479) | 45) |
| | | NO: 44) | | | | | | |
| PMAB | EVQLLE | ASTKGPSVFPLAP | GGGGSG | EVQLLE | GGGGSG | DIQMT | DIVMT | RTVAA |
| 56 | SGGGLV | SSKSTSGGTAALG | GGGSGG | SGGGLV | GGGSGG | QSPSS | QSPDS | PSVFI |
| | QPGGSL | CLVKDYFPEPVTV | GGS | QPGGSL | GGSGGG | LSASV | LAVSL | FPPSD |
| | RLSCAA | SWNSGALTSGVHT | (SEQ | RLSCAA | GS | GDRVT | GERAT | EQLKS |
| | SGFTFS | FPAVLQSSGLYSL | ID NO: | SGFTFS | (SEQ | ITCRA | INCKS | GTASV |
| | SYDMSW | SSVVTVPSSSLGT | 30) | SYWMHW | ID NO: | SQSIS | SQSVL | VCLLN |
| | VRQAPG | QTYICNVNHKPSN | | VRQAPG | 22) | SSLAW | YSPNN | NFYPR |
| | KGLEWV | TKVDKKVEPKSCD | | KGLEWV | | YQQKP | KNYLA | EAKVQ |
| | SGITIS | KTHTCPPCPAPEA | | SYISGS | | GKAPK | WYQQK | WKVDN |
| | GGSTYY | AGAPSVFLFPPKP | | GGYTNY | | LLIYA | PGQPP | ALQSG |
| | ADSVKG | KDTLMISRTPEVT | | ADSVKG | | ASSLQ | KLLIY | NSQES |
| | RFTISR | CVVVDVSHEDPEV | | RFTISR | | SGVPS | WASTR | VTEQD |
| | DNSKNT | KFNWYVDGVEVHN | | DNSKNT | | RFSGS | ESGVP | SKDST |
| | LYLQMN | AKTKPREEQYNST | | LYLQMN | | GSGTD | DRFSG | YSLSS |
| | SLRAED | YRVVSVLTVLHQD | | SLRAED | | FTLTI | SGSGT | TLTLS |
| | TAVYYC | WLNGKEYKCKVSN | | TAVYYC | | SSLQP | DFTLT | KADYE |
| | ARGRGG | KALPAPIEKTISK | | ARDRPY | | EDFAT | ISSLQ | KHKVY |
| | SGWLDY | AKGQPREPQVYTL | | YYDLDV | | YYCQQ | AEDVA | ACEVT |
| | WGQGTT | PPSREEMTKNQVS | | WGKGTT | | YKSYP | VYYCQ | HQGLS |
| | VTVSS | LTCLVKGFYPSDI | | VTVSS | | VTFGQ | QYYTT | SPVTK |
| | (SEQ | AVEWESNGQPENN | | (SEQ | | GTKVE | PPTFG | SFNRG |
| | ID NO: | YKTTPPVLDSDGS | | ID NO: | | IK | QGTRL | EC |
| | 1476) | FFLYSKLTVDKSR | | 1480) | | (SEQ | EIK | (SEQ |
| | | WQQGNVFSCSVMH | | | | ID | (SEQ | ID |
| | | EALHNHYTQKSLS | | | | NO: | ID | NO: |
| | | LSPG (SEQ ID | | | | 1367) | NO: | 45) |
| | | NO: 44) | | | | | 1359) | |
| PMAB | QVQLVQ | ASTKGPSVFPLAP | GGGGSG | EVQLLE | GGGGSG | DIQMT | DIQMT | RTVAA |
| 57 | SGAEVK | SSKSTSGGTAALG | GGGSGG | SGGGLV | GGGSGG | QSPSS | QSPSS | PSVFI |
| | KPGASV | CLVKDYFPEPVTV | GGS | QPGGSL | GGSGGG | LSASV | LSASV | FPPSD |
| | KVSCKA | SWNSGALTSGVHT | (SEQ | RLSCAA | GS | GDRVT | GDRVT | EQLKS |
| | SGYSFT | FPAVLQSSGLYSL | ID NO: | SGFTFS | (SEQ | ITCRA | ITCQA | GTASV |
| | TYYMHW | SSVVTVPSSSLGT | 30) | DFWMHW | ID NO: | SQSVS | SRDIK | VCLLN |
| | VRQAPG | QTYICNVNHKPSN | | VRQAPG | 22) | RSLAW | NYLAW | NFYPR |
| | QGLEWM | TKVDKKVEPKSCD | | KGLEWI | | YQQKP | YQQKP | EAKVQ |
| | GIIAPS | KTHTCPPCPAPEA | | SYISGD | | GKAPK | GKAPK | WKVDN |
| | GGSTSY | AGAPSVFLFPPKP | | SGYTNY | | LLIYA | LLIYA | ALQSG |
| | AQKFQG | KDTLMISRTPEVT | | ADSVKG | | ASSLQ | ASSLQ | NSQES |
| | RVTMTR | CVVVDVSHEDPEV | | RFTISR | | SGVPS | SGVPS | VTEQD |
| | DTSTST | KFNWYVDGVEVHN | | DNSKNT | | RFSGS | RFSGS | SKDST |
| | VYMELS | AKTKPREEQYNST | | LYLQMN | | GSGTD | GSGTD | YSLSS |
| | SLRSED | YRVVSVLTVLHQD | | SLRAED | | FTLTI | FTLTI | TLTLS |
| | TAVYYC | WLNGKEYKCKVSN | | TAVYYC | | SSLQP | SSLQP | KADYE |
| | ASGWVY | KALPAPIEKTISK | | ARDRPY | | EDFAT | EDFAT | KHKVY |
| | WGQGTL | AKGQPREPQVYTL | | YYYMDV | | YYCQQ | YYCQQ | ACEVT |
| | VTVSS | PPSREEMTKNQVS | | WGKGTT | | YKSYP | SYSTP | HQGLS |
| | (SEQ | LTCLVKGFYPSDI | | VTVSS | | VTFGQ | PTFGP | SPVTK |
| | ID NO: | AVEWESNGQPENN | | (SEQ | | GTKVE | GTKVD | SFNRG |
| | 1448) | YKTTPPVLDSDGS | | ID NO: | | IK | IK | EC |
| | | FFLYSKLTVDKSR | | 591) | | (SEQ | (SEQ | (SEQ |
| | | WQQGNVFSCSVMH | | | | ID | ID | ID |
| | | EALHNHYTQKSLS | | | | NO: | NO: | NO: |
| | | LSPG (SEQ ID | | | | 592) | 1449) | 45) |
| | | NO: 44) | | | | | | |
| PMAB | EVQLLE | ASTKGPSVFPLAP | GGGGSG | EVQLLE | GGGGSG | DIQMT | DIVMT | RTVAA |
| 60 | SGGGLV | SSKSTSGGTAALG | GGGSGG | SGGGLV | GGGSGG | QSPSS | QSPDS | PSVFI |
| | QPGGSL | CLVKDYFPEPVTV | GGS | QPGGSL | GGSGGG | LSASV | LAVSL | FPPSD |
| | RLSCAA | SWNSGALTSGVHT | (SEQ | RLSCAA | GS | GDRVT | GERAT | EQLKS |
| | SGFTFS | FPAVLQSSGLYSL | ID NO: | SGFTFS | (SEQ | ITCRA | INCKS | GTASV |
| | SYDMSW | SSVVTVPSSSLGT | 30) | SYWMHW | ID NO: | SQSIS | SQSVL | VCLLN |
| | VRQAPG | QTYICNVNHKPSN | | VRQAPG | 22) | SSLAW | YSPNN | NFYPR |
| | KGLEWV | TKVDKKVEPKSCD | | KCLEWV | | YQQKP | KNYLA | EAKVQ |
| | SGITIS | KTHTCPPCPAPEA | | SYISGS | | GKAPK | WYQQK | WKVDN |
| | GGSTYY | AGAPSVFLFPPKP | | GGYTNY | | LLIYA | PGQPP | ALQSG |
| | ADSVKG | KDTLMISRTPEVT | | ADSVKG | | ASSLQ | KLLIY | NSQES |
| | RFTISR | CVVVDVSHEDPEV | | RFTISR | | SGVPS | WASTR | VTEQD |
| | DNSKNT | KFNWYVDGVEVHN | | DNSKNT | | RFSGS | ESGVP | SKDST |
| | LYLQMN | AKTKPREEQYNST | | LYLQMN | | GSGTD | DRFSG | YSLSS |
| | SLRAED | YRVVSVLTVLHQD | | SLRAED | | FTLTI | SGSGT | TLTLS |
| | TAVYYC | WLNGKEYKCKVSN | | TAVYYC | | SSLQP | DFTLT | KADYE |
| | ARGRGG | KALPAPIEKTISK | | ARDRPY | | EDFAT | ISSLQ | KHKVY |
| | SGWLDY | AKGQPREPQVYTL | | YYDMDV | | YYCQQ | AEDVA | ACEVT |
| | WGQGTT | PPSREEMTKNQVS | | WGKGTT | | YKSYP | VYYCQ | HQGLS |
| | VTVSS | LTCLVKGFYPSDI | | VTVSS | | VTFGC | QYYTT | SPVTK |
| | (SEQ | AVEWESNGQPENN | | (SEQ | | GTKVE | PPTFG | SFNRG |
| | ID NO: | YKTTPPVLDSDGS | | ID NO: | | IK | QGTRL | EC |
| | 1476) | FFLYSKLTVDKSR | | 1542) | | (SEQ | EIK | (SEQ |
| | | WQQGNVFSCSVMH | | | | ID | (SEQ | ID |
| | | EALHNHYTQKSLS | | | | NO: | ID | NO: |
| | | LSPG (SEQ ID | | | | 1543) | NO: | 45) |
| | | NO: 44) | | | | | 1359) | |
| PMAB | EVQLVQ | ASTKGPSVFPLAP | GGGGSG | EVQLLE | GGGGSG | DIQMT | DIQMT | RTVAA |
| 61 | SGAEVK | SSKSTSGGTAALG | GGGSGG | SGGGLV | GGGSGG | QSPSS | QSPSS | PSVFI |
| | KPGASV | CLVKDYFPEPVTV | GGS | QPGGSL | GGSGGG | LSASV | LSASV | FPPSD |
| | KVSCKA | SWNSGALTSGVHT | (SEQ | RLSCAA | GS | GDRVT | GDRVT | EQLKS |
| | SGYSFT | FPAVLQSSGLYSL | ID NO: | SGFTFS | (SEQ | ITCRA | ITCRA | GTASV |
| | SYYMHW | SSVVTVPSSSLGT | 30) | SYWMHW | ID NO: | SQSIS | SQSIS | VCLLN |
| | VRQAPG | QTYICNVNHKPSN | | VRQAPG | 22) | SSLAW | SYLAW | NFYPR |
| | QGLEWM | TKVDKKVEPKSCD | | KCLEWV | | YQQKP | YQQKP | EAKVQ |
| | GIINPS | KTHTCPPCPAPEA | | SYISGS | | GKAPK | GKAPK | WKVDN |
| | GGSTSY | AGAPSVFLFPPKP | | GGYTNY | | LLIYA | LLIYA | ALQSG |
| | AQKFQG | KDTLMISRTPEVT | | ADSVKG | | ASSLQ | ASSLQ | NSQES |
| | RVTMTR | CVVVDVSHEDPEV | | RFTISR | | SGVPS | SGVPS | VTEQD |
| | DTSTST | KFNWYVDGVEVHN | | DNSKNT | | RFSGS | RFSGS | SKDST |
| | VYMELS | AKTKPREEQYNST | | LYLQMN | | GSGTD | GSGTD | YSLSS |
| | SLRSED | YRVVSVLTVLHQD | | SLRAED | | FTLTI | FTLTI | TLTLS |
| | TAVYYC | WLNGKEYKCKVSN | | TAVYYC | | SSLQP | SSLQP | KADYE |
| | ASGWVY | KALPAPIEKTISK | | ARDRPY | | EDFAT | EDFAT | KHKVY |
| | WGQGTL | AKGQPREPQVYTL | | YYDMDV | | YYCQQ | YYCQQ | ACEVT |
| | VTVSS | PPSREEMTKNQVS | | WGKGTT | | YKSYP | SYSTP | HQGLS |
| | (SEQ | LTCLVKGFYPSDI | | VTVSS | | VTFGC | PTFGP | SPVTK |
| | ID NO: | AVEWESNGQPENN | | (SEQ | | GTKVE | GTKVD | SFNRG |
| | 1478) | YKTTPPVLDSDGS | | ID NO: | | IK | IK | EC |
| | | FFLYSKLTVDKSR | | 1542) | | (SEQ | (SEQ | (SEQ |
| | | WQQGNVFSCSVMH | | | | ID | ID | ID |
| | | EALHNHYTQKSLS | | | | NO: | NO: | NO: |
| | | LSPG (SEQ ID | | | | 1543) | 1479) | 45) |
| | | NO: 44) | | | | | | |
| PMAB | EVQLLE | ASTKGPSVFPLAP | GGGGSG | EVQLLE | GGGGSG | DIQMT | DIVMT | RTVAA |
| 62 | SGGGLV | SSKSTSGGTAALG | GGGSGG | SGGGLV | GGGSGG | QSPSS | QSPDS | PSVFI |
| | QPGGSL | CLVKDYFPEPVTV | GGS | QPGGSL | GGSGGG | LSASV | LAVSL | FPPSD |
| | RLSCAA | SWNSGALTSGVHT | (SEQ | RLSCAA | GS | GDRVT | GERAT | EQLKS |
| | SGFTFS | FPAVLQSSGLYSL | ID NO: | SGFTFS | (SEQ | ITCRA | INCKS | GTASV |
| | SYDMSW | SSVVTVPSSSLGT | 30) | SYWMHW | ID NO: | SQSIS | SQSVL | VCLLN |
| | VRQAPG | QTYICNVNHKPSN | | VRQAPG | 22) | SSLAW | YSPNN | NFYPR |
| | KGLEWV | TKVDKKVEPKSCD | | KCLEWV | | YQQKP | KNYLA | EAKVQ |
| | SGITIS | KTHTCPPCPAPEA | | SYISGS | | GKAPK | WYQQK | WKVDN |
| | GGSTYY | AGAPSVFLFPPKP | | GGYTNY | | LLIYA | PGQPP | ALQSG |
| | ADSVKG | KDTLMISRTPEVT | | ADSVKG | | ASSLQ | KLLIY | NSQES |
| | RFTISR | CVVVDVSHEDPEV | | RFTISR | | SGVPS | WASTR | VTEQD |
| | DNSKNT | KFNWYVDGVEVHN | | DNSKNT | | RFSGS | ESGVP | SKDST |
| | LYLQMN | AKTKPREEQYNST | | LYLQMN | | GSGTD | DRFSG | YSLSS |
| | SLRAED | YRVVSVLTVLHQD | | SLRAED | | FTLTI | SGSGT | TLTLS |
| | TAVYYC | WLNGKEYKCKVSN | | TAVYYC | | SSLQP | DFTLT | KADYE |
| | ARGRGG | KALPAPIEKTISK | | ARDRPY | | EDFAT | ISSLQ | KHKVY |
| | SGWLDY | AKGQPREPQVYTL | | YYDIDV | | YYCQQ | AEDVA | ACEVT |
| | WGOGTT | PPSREEMTKNQVS | | WGKGTT | | YKSYP | VYYCQ | HQGLS |
| | VTVSS | LTCLVKGFYPSDI | | VTVSS | | VTFGC | QYYTT | SPVTK |
| | (SEQ | AVEWESNGQPENN | | (SEQ | | GTKVE | PPTFG | SFNRG |
| | ID NO: | YKTTPPVLDSDGS | | ID NO: | | IK | QGTRL | EC |
| | 1476) | FFLYSKLTVDKSR | | 1544) | | (SEQ | EIK | (SEQ |
| | | WQQGNVFSCSVMH | | | | ID | (SEQ | ID |
| | | EALHNHYTQKSLS | | | | NO: | ID | NO: |
| | | LSPG (SEQ ID | | | | 1543) | NO: | 45) |
| | | NO: 44) | | | | | 1359) | |
| PMAB | EVQLVQ | ASTKGPSVFPLAP | GGGGSG | EVQLLE | GGGGSG | DIQMT | DIQMT | RTVAA |
| 63 | SGAEVK | SSKSTSGGTAALG | GGGSGG | SGGGLV | GGGSGG | QSPSS | QSPSS | PSVFI |
| | KPGASV | CLVKDYFPEPVTV | GGS | QPGGSL | GGSGGG | LSASV | LSASV | FPPSD |
| | KVSCKA | SWNSGALTSGVHT | (SEQ | RLSCAA | GS | GDRVT | GDRVT | EQLKS |
| | SGYSFT | FPAVLQSSGLYSL | ID NO: | SGFTFS | (SEQ | ITCRA | ITCRA | GTASV |
| | SYYMHW | SSVVTVPSSSLGT | 30) | SYWMHW | ID NO: | SQSIS | SQSIS | VCLLN |
| | VRQAPG | QTYICNVNHKPSN | | VRQAPG | 22) | SSLAW | SYLAW | NFYPR |
| | QGLEWM | TKVDKKVEPKSCD | | KCLEWV | | YQQKP | YQQKP | EAKVQ |
| | GIINPS | KTHTCPPCPAPEA | | SYISGS | | GKAPK | GKAPK | WKVDN |
| | GGSTSY | AGAPSVFLFPPKP | | GGYTNY | | LLIYA | LLIYA | ALQSG |
| | AQKFQG | KDTLMISRTPEVT | | ADSVKG | | ASSLQ | ASSLQ | NSQES |
| | RVTMTR | CVVVDVSHEDPEV | | RFTISR | | SGVPS | SGVPS | VTEQD |
| | DTSTST | KFNWYVDGVEVHN | | DNSKNT | | RFSGS | RFSGS | SKDST |
| | VYMELS | AKTKPREEQYNST | | LYLQMN | | GSGTD | GSGTD | YSLSS |
| | SLRSED | YRVVSVLTVLHQD | | SLRAED | | FTLTI | FTLTI | TLTLS |
| | TAVYYC | WLNGKEYKCKVSN | | TAVYYC | | SSLQP | SSLQP | KADYE |
| | ASGWVY | KALPAPIEKTISK | | ARDRPY | | EDFAT | EDFAT | KHKVY |
| | WGQGTL | AKGQPREPQVYTL | | YYDIDV | | YYCQQ | YYCQQ | ACEVT |
| | VTVSS | PPSREEMTKNQVS | | WGKGTT | | YKSYP | SYSTP | HQGLS |
| | (SEQ | LTCLVKGFYPSDI | | VTVSS | | VTFGC | PTFGP | SPVTK |
| | ID NO: | AVEWESNGQPENN | | (SEQ | | GTKVE | GTKVD | SFNRG |
| | 1478) | YKTTPPVLDSDGS | | ID NO: | | IK | IK | EC |
| | | FFLYSKLTVDKSR | | 1544) | | (SEQ | (SEQ | (SEQ |
| | | WQQGNVFSCSVMH | | | | ID | ID | ID |
| | | EALHNHYTQKSLS | | | | NO: | NO: | NO: |
| | | LSPG (SEQ ID | | | | 1543) | 1479) | 45) |
| | | NO: 44) | | | | | | |
| PMAB | EVQLVQ | ASTKGPSVFPLAP | GGGGSG | EVQLLE | GGGGSG | DIQMT | DIQMT | RTVAA |
| 64 | SGAEVK | SSKSTSGGTAALG | GGGSGG | SGGGLV | GGGSGG | QSPSS | QSPSS | PSVFI |
| | KPGASV | CLVKDYFPEPVTV | GGS | QPGGSL | GGSGGG | LSASV | LSASV | FPPSD |
| | KVSCKA | SWNSGALTSGVHT | (SEQ | RLSCAA | GS | GDRVT | GDRVT | EQLKS |
| | SGYSFT | FPAVLQSSGLYSL | ID NO: | SGFTFS | (SEQ | ITCRA | ITCRA | GTASV |
| | SYYMHW | SSVVTVPSSSLGT | 30) | SYWMHW | ID NO: | SQSIS | SQSIS | VCLLN |
| | VRQAPG | QTYICNVNHKPSN | | VRQAPG | 22) | SSLAW | SYLAW | NFYPR |
| | QGLEWM | TKVDKKVEPKSCD | | KCLEWV | | YQQKP | YQQKP | EAKVQ |
| | GIINPS | KTHTCPPCPAPEA | | SYISGS | | GKAPK | GKAPK | WKVDN |
| | GGSTSY | AGAPSVFLFPPKP | | GGYTNY | | LLIYA | LLIYA | ALQSG |
| | AQKFQG | KDTLMISRTPEVT | | ADSVKG | | ASSLQ | ASSLQ | NSQES |
| | RVTMTR | CVVVDVSHEDPEV | | RFTISR | | SGVPS | SGVPS | VTEQD |
| | DTSTST | KFNWYVDGVEVHN | | DNSKNT | | RFSGS | RFSGS | SKDST |
| | VYMELS | AKTKPREEQYNST | | LYLQMN | | GSGTD | GSGTD | YSLSS |
| | SLRSED | YRVVSVLTVLHQD | | SLRAED | | FTLTI | FTLTI | TLTLS |
| | TAVYYC | WLNGKEYKCKVSN | | TAVYYC | | SSLQP | SSLQP | KADYE |
| | ASGWVY | KALPAPIEKTISK | | ARDRPY | | EDFAT | EDFAT | KHKVY |
| | WGQGTL | AKGQPREPQVYTL | | YYDLDV | | YYCQQ | YYCQQ | ACEVT |
| | VTVSS | PPSREEMTKNQVS | | WGKGTT | | YKSYP | SYSTP | HQGLS |
| | (SEQ | LTCLVKGFYPSDI | | VTVSS | | VTFGC | PTFGP | SPVTK |
| | ID NO: | AVEWESNGQPENN | | (SEQ | | GTKVE | GTKVD | SFNRG |
| | 1478) | YKTTPPVLDSDGS | | ID NO: | | IK | IK | EC |
| | | FFLYSKLTVDKSR | | 1545) | | (SEQ | (SEQ | (SEQ |
| | | WQQGNVFSCSVMH | | | | ID | ID | ID |
| | | EALHNHYTQKSLS | | | | NO: | NO: | NO: |
| | | LSPG (SEQ ID | | | | 1543) | 1479) | 45) |
| | | NO: 44) | | | | | | |
| PMAB | EVQLLE | ASTKGPSVFPLAP | GGGGSG | EVQLLE | GGGGSG | DIQMT | DIVMT | RTVAA |
| 65 | SGGGLV | SSKSTSGGTAALG | GGGSGG | SGGGLV | GGGSGG | QSPSS | QSPDS | PSVFI |
| | QPGGSL | CLVKDYFPEPVTV | GGS | QPGGSL | GGSGGG | LSASV | LAVSL | FPPSD |
| | RLSCAA | SWNSGALTSGVHT | (SEQ | RLSCAA | GS | GDRVT | GERAT | EQLKS |
| | SGFTFS | FPAVLQSSGLYSL | ID NO: | SGFTFS | (SEQ | ITCRA | INCKS | GTASV |
| | SYDMSW | SSVVTVPSSSLGT | 30) | SYWMHW | ID NO: | SQSIS | SQSVL | VCLLN |
| | VRQAPG | QTYICNVNHKPSN | | VRQAPG | 22) | SSLAW | YSPNN | NFYPR |
| | KGLEWV | TKVDKKVEPKSCD | | KCLEWV | | YQQKP | KNYLA | EAKVQ |
| | SGITIS | KTHTCPPCPAPEA | | SYISGS | | GKAPK | WYQQK | WKVDN |
| | GGSTYY | AGAPSVFLFPPKP | | GGYTNY | | LLIYA | PGQPP | ALQSG |
| | ADSVKG | KDTLMISRTPEVT | | ADSVKG | | ASSLQ | KLLIY | NSQES |
| | RFTISR | CVVVDVSHEDPEV | | RFTISR | | SGVPS | WASTR | VTEQD |
| | DNSKNT | KFNWYVDGVEVHN | | DNSKNT | | RFSGS | ESGVP | SKDST |
| | LYLQMN | AKTKPREEQYNST | | LYLQMN | | GSGTD | DRFSG | YSLSS |
| | SLRAED | YRVVSVLTVLHQD | | SLRAED | | FTLTI | SGSGT | TLTLS |
| | TAVYYC | WLNGKEYKCKVSN | | TAVYYC | | SSLQP | DFTLT | KADYE |
| | ARGRGG | KALPAPIEKTISK | | ARDRPY | | EDFAT | ISSLQ | KHKVY |
| | SGWLDY | AKGQPREPQVYTL | | YYDLDV | | YYCQQ | AEDVA | ACEVT |
| | WGQGTT | PPSREEMTKNQVS | | WGKGTT | | YKSYP | VYYCQ | HQGLS |
| | VTVSS | LTCLVKGFYPSDI | | VTVSS | | VTFGC | QYYTT | SPVTK |
| | (SEQ | AVEWESNGQPENN | | (SEQ | | GTKVE | PPTFG | SFNRG |
| | ID NO: | YKTTPPVLDSDGS | | ID NO: | | IK | QGTRL | EC |
| | 1476) | FFLYSKLTVDKSR | | 1545) | | (SEQ | EIK | (SEQ |
| | | WQQGNVFSCSVMH | | | | ID | (SEQ | ID |
| | | EALHNHYTQKSLS | | | | NO: | ID | NO: |
| | | LSPG (SEQ ID | | | | 1543) | NO: | 45) |
| | | NO: 44) | | | | | 1359) | |
| PMAB | EVQLLE | ASTKGPSVFPLAP | GGGSEG | EVQLLE | GGGGSG | DIQMT | DIVMT | RTVAA |
| 66 | SGGGLV | SSKSTSGGTAALG | GGSEGG | SGGGLV | GGGSGG | QSPSS | QSPDS | PSVFI |
| | QPGGSL | CLVKDYFPEPVTV | GSE | QPGGSL | GGSGGG | LSASV | LAVSL | FPPSD |
| | RLSCAA | SWNSGALTSGVHT | (SEQ | RLSCAA | GS | GDRVT | GERAT | EQLKS |
| | SGFTFS | FPAVLQSSGLYSL | ID NO: | SGFTFS | (SEQ | ITCRA | INCKS | GTASV |
| | SYDMSW | SSVVTVPSSSLGT | 1546) | SYWMHW | ID NO: | SQSIS | SQSVL | VCLLN |
| | VRQAPG | QTYICNVNHKPSN | | VRQAPG | 22) | SSLAW | YSPNN | NFYPR |
| | KGLEWV | TKVDKKVEPKSCD | | KGLEWV | | YQQKP | KNYLA | EAKVQ |
| | SGITIS | KTHTCPPCPAPEA | | SYISGS | | GKAPK | WYQQK | WKVDN |
| | GGSTYY | AGAPSVFLFPPKP | | GGYTNY | | LLIYA | PGQPP | ALQSG |
| | ADSVKG | KDTLMISRTPEVT | | ADSVKG | | ASSLQ | KLLIY | NSQES |
| | RFTISR | CVVVDVSHEDPEV | | RFTISR | | SGVPS | WASTR | VTEQD |
| | DNSKNT | KFNWYVDGVEVHN | | DNSKNT | | RFSGS | ESGVP | SKDST |
| | LYLQMN | AKTKPREEQYNST | | LYLQMN | | GSGTD | DRFSG | YSLSS |
| | SLRAED | YRVVSVLTVLHQD | | SLRAED | | FTLTI | SGSGT | TLTLS |
| | TAVYYC | WLNGKEYKCKVSN | | TAVYYC | | SSLQP | DFTLT | KADYE |
| | ARGRGG | KALPAPIEKTISK | | ARDRPY | | EDFAT | ISSLQ | KHKVY |
| | SGWLDY | AKGQPREPQVYTL | | YYDMDV | | YYCQQ | AEDVA | ACEVT |
| | WGOGTT | PPSREEMTKNQVS | | WGKGTT | | YKSYP | VYYCQ | HQGLS |
| | VTVSS | LTCLVKGFYPSDI | | VTVSS | | VTFGQ | QYYTT | SPVTK |
| | (SEQ | AVEWESNGQPENN | | (SEQ | | GTKVE | PPTFG | SFNRG |
| | ID NO: | YKTTPPVLDSDGS | | ID NO: | | IK | QGTRL | EC |
| | 1476) | FFLYSKLTVDKSR | | 1445) | | (SEQ | EIK | (SEQ |
| | | WQQGNVFSCSVMH | | | | ID | (SEQ | ID |
| | | EALHNHYTQKSLS | | | | NO: | ID | NO: |
| | | LSPG (SEQ ID | | | | 1367) | NO: | 45) |
| | | NO: 44) | | | | | 1359) | |
| PMAB | EVQLVQ | ASTKGPSVFPLAP | GGGSEG | EVQLLE | GGGGSG | DIQMT | DIQMT | RTVAA |
| 67 | SGAEVK | SSKSTSGGTAALG | GGSEGG | SGGGLV | GGGSGG | QSPSS | QSPSS | PSVFI |
| | KPGASV | CLVKDYFPEPVTV | GSE | QPGGSL | GGSGGG | LSASV | LSASV | FPPSD |
| | KVSCKA | SWNSGALTSGVHT | (SEQ | RLSCAA | GS | GDRVT | GDRVT | EQLKS |
| | SGYSFT | FPAVLQSSGLYSL | ID NO: | SGFTFS | (SEQ | ITCRA | ITCRA | GTASV |
| | SYYMHW | SSVVTVPSSSLGT | 1546) | SYWMHW | ID NO: | SQSIS | SQSIS | VCLLN |
| | VRQAPG | QTYICNVNHKPSN | | VRQAPG | 22) | SSLAW | SYLAW | NFYPR |
| | QGLEWM | TKVDKKVEPKSCD | | KGLEWV | | YQQKP | YQQKP | EAKVQ |
| | GIINPS | KTHTCPPCPAPEA | | SYISGS | | GKAPK | GKAPK | WKVDN |
| | GGSTSY | AGAPSVFLFPPKP | | GGYTNY | | LLIYA | LLIYA | ALQSG |
| | AQKFQG | KDTLMISRTPEVT | | ADSVKG | | ASSLQ | ASSLQ | NSQES |
| | RVTMTR | CVVVDVSHEDPEV | | RFTISR | | SGVPS | SGVPS | VTEQD |
| | DTSTST | KFNWYVDGVEVHN | | DNSKNT | | RFSGS | RFSGS | SKDST |
| | VYMELS | AKTKPREEQYNST | | LYLQMN | | GSGTD | GSGTD | YSLSS |
| | SLRSED | YRVVSVLTVLHQD | | SLRAED | | FTLTI | FTLTI | TLTLS |
| | TAVYYC | WLNGKEYKCKVSN | | TAVYYC | | SSLQP | SSLQP | KADYE |
| | ASGWVY | KALPAPIEKTISK | | ARDRPY | | EDFAT | EDFAT | KHKVY |
| | WGQGTL | AKGQPREPQVYTL | | YYDMDV | | YYCQQ | YYCQQ | ACEVT |
| | VTVSS | PPSREEMTKNQVS | | WGKGTT | | YKSYP | SYSTP | HQGLS |
| | (SEQ | LTCLVKGFYPSDI | | VTVSS | | VTFGQ | PTFGP | SPVTK |
| | ID NO: | AVEWESNGQPENN | | (SEQ | | GTKVE | GTKVD | SFNRG |
| | 1478) | YKTTPPVLDSDGS | | ID NO: | | IK | IK | EC |
| | | FFLYSKLTVDKSR | | 1445) | | (SEQ | (SEQ | (SEQ |
| | | WQQGNVFSCSVMH | | | | ID | ID | ID |
| | | EALHNHYTQKSLS | | | | NO: | NO: | NO: |
| | | LSPG (SEQ ID | | | | 1367) | 1479) | 45) |
| | | NO: 44) | | | | | | |
| PMAB | EVQLLE | ASTKGPSVFPLAP | GGGSEG | EVQLLE | GGGGSG | DIQMT | DIVMT | RTVAA |
| 68 | SGGGLV | SSKSTSGGTAALG | GGSEGG | SGGGLV | GGGSGG | QSPSS | QSPDS | PSVFI |
| | QPGGSL | CLVKDYFPEPVTV | GSE | QPGGSL | GGSGGG | LSASV | LAVSL | FPPSD |
| | RLSCAA | SWNSGALTSGVHT | (SEQ | RLSCAA | GS | GDRVT | GERAT | EQLKS |
| | SGFTFS | FPAVLQSSGLYSL | ID NO: | SGFTFS | (SEQ | ITCRA | INCKS | GTASV |
| | SYDMSW | SSVVTVPSSSLGT | 1546) | SYWMHW | ID NO: | SQSIS | SQSVL | VCLLN |
| | VRQAPG | QTYICNVNHKPSN | | VRQAPG | 22) | SSLAW | YSPNN | NFYPR |
| | KGLEWV | TKVDKKVEPKSCD | | KGLEWV | | YQQKP | KNYLA | EAKVQ |
| | SGITIS | KTHTCPPCPAPEA | | SYISGS | | GKAPK | WYQQK | WKVDN |
| | GGSTYY | AGAPSVFLFPPKP | | GGYTNY | | LLIYA | PGQPP | ALQSG |
| | ADSVKG | KDTLMISRTPEVT | | ADSVKG | | ASSLQ | KLLIY | NSQES |
| | RFTISR | CVVVDVSHEDPEV | | RFTISR | | SGVPS | WASTR | VTEQD |
| | DNSKNT | KFNWYVDGVEVHN | | DNSKNT | | RFSGS | ESGVP | SKDST |
| | LYLQMN | AKTKPREEQYNST | | LYLQMN | | GSGTD | DRFSG | YSLSS |
| | SLRAED | YRVVSVLTVLHQD | | SLRAED | | FTLTI | SGSGT | TLTLS |
| | TAVYYC | WLNGKEYKCKVSN | | TAVYYC | | SSLQP | DFTLT | KADYE |
| | ARGRGG | KALPAPIEKTISK | | ARDRPY | | EDFAT | ISSLQ | KHKVY |
| | SGWLDY | AKGQPREPQVYTL | | YYDIDV | | YYCQQ | AEDVA | ACEVT |
| | WGQGTT | PPSREEMTKNQVS | | WGKGTT | | YKSYP | VYYCQ | HQGLS |
| | VTVSS | LTCLVKGFYPSDI | | VTVSS | | VTFGQ | QYYTT | SPVTK |
| | (SEQ | AVEWESNGQPENN | | (SEQ | | GTKVE | PPTFG | SFNRG |
| | ID NO: | YKTTPPVLDSDGS | | ID NO: | | IK | QGTRL | EC |
| | 1476) | FFLYSKLTVDKSR | | 1477) | | (SEQ | EIK | (SEQ |
| | | WQQGNVFSCSVMH | | | | ID | (SEQ | ID |
| | | EALHNHYTQKSLS | | | | NO: | ID | NO: |
| | | LSPG (SEQ ID | | | | 1367) | NO: | 45) |
| | | NO: 44) | | | | | 1359) | |
| PMAB | EVQLVQ | ASTKGPSVFPLAP | GGGSEG | EVQLLE | GGGGSG | DIQMT | DIQMT | RTVAA |
| 69 | SGAEVK | SSKSTSGGTAALG | GGSEGG | SGGGLV | GGGSGG | QSPSS | QSPSS | PSVFI |
| | KPGASV | CLVKDYFPEPVTV | GSE | QPGGSL | GGSGGG | LSASV | LSASV | FPPSD |
| | KVSCKA | SWNSGALTSGVHT | (SEQ | RLSCAA | GS | GDRVT | GDRVT | EQLKS |
| | SGYSFT | FPAVLQSSGLYSL | ID NO: | SGFTFS | (SEQ | ITCRA | ITCRA | GTASV |
| | SYYMHW | SSVVTVPSSSLGT | 1546) | SYWMHW | ID NO: | SQSIS | SQSIS | VCLLN |
| | VRQAPG | QTYICNVNHKPSN | | VRQAPG | 22) | SSLAW | SYLAW | NFYPR |
| | QGLEWM | TKVDKKVEPKSCD | | KGLEWV | | YQQKP | YQQKP | EAKVQ |
| | GIINPS | KTHTCPPCPAPEA | | SYISGS | | GKAPK | GKAPK | WKVDN |
| | GGSTSY | AGAPSVFLFPPKP | | GGYTNY | | LLIYA | LLIYA | ALQSG |
| | AQKFQG | KDTLMISRTPEVT | | ADSVKG | | ASSLQ | ASSLQ | NSQES |
| | RVTMTR | CVVVDVSHEDPEV | | RFTISR | | SGVPS | SGVPS | VTEQD |
| | DTSTST | KFNWYVDGVEVHN | | DNSKNT | | RFSGS | RFSGS | SKDST |
| | VYMELS | AKTKPREEQYNST | | LYLQMN | | GSGTD | GSGTD | YSLSS |
| | SLRSED | YRVVSVLTVLHQD | | SLRAED | | FTLTI | FTLTI | TLTLS |
| | TAVYYC | WLNGKEYKCKVSN | | TAVYYC | | SSLQP | SSLQP | KADYE |
| | ASGWVY | KALPAPIEKTISK | | ARDRPY | | EDFAT | EDFAT | KHKVY |
| | WGQGTL | AKGQPREPQVYTL | | YYDIDV | | YYCQQ | YYCQQ | ACEVT |
| | VTVSS | PPSREEMTKNQVS | | WGKGTT | | YKSYP | SYSTP | HQGLS |
| | SEQ | LTCLVKGFYPSDI | | VTVSS | | VTFGQ | PTFGP | SPVTK |
| | ID NO: | AVEWESNGQPENN | | (SEQ | | GTKVE | GTKVD | SFNRG |
| | 1478) | YKTTPPVLDSDGS | | ID NO: | | IK | IK | EC |
| | | FFLYSKLTVDKSR | | 1477) | | (SEQ | (SEQ | (SEQ |
| | | WQQGNVFSCSVMH | | | | ID | ID | ID |
| | | EALHNHYTQKSLS | | | | NO: | NO: | NO: |
| | | LSPG (SEQ ID | | | | 1367) | 1479) | 45) |
| | | NO: 44) | | | | | | |
| PMAB | EVQLVQ | ASTKGPSVFPLAP | GGGSEG | EVQLLE | GGGGSG | DIQMT | DIQMT | RTVAA |
| 70 | SGAEVK | SSKSTSGGTAALG | GGSEGG | SGGGLV | GGGSGG | QSPSS | QSPSS | PSVFI |
| | KPGASV | CLVKDYFPEPVTV | GSE | QPGGSL | GGSGGG | LSASV | LSASV | FPPSD |
| | KVSCKA | SWNSGALTSGVHT | (SEQ | RLSCAA | GS | GDRVT | GDRVT | EQLKS |
| | SGYSFT | FPAVLQSSGLYSL | ID NO: | SGFTFS | (SEQ | ITCRA | ITCRA | GTASV |
| | SYYMHW | SSVVTVPSSSLGT | 1546) | SYWMHW | ID NO: | SQSIS | SQSIS | VCLLN |
| | VRQAPG | QTYICNVNHKPSN | | VRQAPG | 22) | SSLAW | SYLAW | NFYPR |
| | QGLEWM | TKVDKKVEPKSCD | | KGLEWV | | YQQKP | YQQKP | EAKVQ |
| | GIINPS | KTHTCPPCPAPEA | | SYISGS | | GKAPK | GKAPK | WKVDN |
| | GGSTSY | AGAPSVFLFPPKP | | GGYTNY | | LLIYA | LLIYA | ALQSG |
| | AQKFQG | KDTLMISRTPEVT | | ADSVKG | | ASSLQ | ASSLQ | NSQES |
| | RVTMTR | CVVVDVSHEDPEV | | RFTISR | | SGVPS | SGVPS | VTEQD |
| | DTSTST | KFNWYVDGVEVHN | | DNSKNT | | RFSGS | RFSGS | SKDST |
| | VYMELS | AKTKPREEQYNST | | LYLQMN | | GSGTD | GSGTD | YSLSS |
| | SLRSED | YRVVSVLTVLHQD | | SLRAED | | FTLTI | FTLTI | TLTLS |
| | TAVYYC | WLNGKEYKCKVSN | | TAVYYC | | SSLQP | SSLQP | KADYE |
| | ASGWVY | KALPAPIEKTISK | | ARDRPY | | EDFAT | EDFAT | KHKVY |
| | WGQGTL | AKGQPREPQVYTL | | YYDLDV | | YYCQQ | YYCQQ | ACEVT |
| | VTVSS | PPSREEMTKNQVS | | WGKGTT | | YKSYP | SYSTP | HQGLS |
| | (SEQ | LTCLVKGFYPSDI | | VTVSS | | VTFGQ | PTFGP | SPVTK |
| | ID NO: | AVEWESNGQPENN | | (SEQ | | GTKVE | GTKVD | SFNRG |
| | 1478) | YKTTPPVLDSDGS | | ID NO: | | IK | IK | EC |
| | | FFLYSKLTVDKSR | | 1480) | | (SEQ | (SEQ | (SEQ |
| | | WQQGNVFSCSVMH | | | | ID | ID | ID |
| | | EALHNHYTQKSLS | | | | NO: | NO: | NO: |
| | | LSPG (SEQ ID | | | | 1367) | 1479) | 45) |
| | | NO: 44) | | | | | | |
| PMAB | EVQLLE | ASTKGPSVFPLAP | GGGSEG | EVQLLE | GGGGSG | DIQMT | DIVMT | RTVAA |
| 71 | SGGGLV | SSKSTSGGTAALG | GGSEGG | SGGGLV | GGGSGG | QSPSS | QSPDS | PSVFI |
| | QPGGSL | CLVKDYFPEPVTV | GSE | QPGGSL | GGSGGG | LSASV | LAVSL | FPPSD |
| | RLSCAA | SWNSGALTSGVHT | (SEQ | RLSCAA | GS | GDRVT | GERAT | EQLKS |
| | SGFTFS | FPAVLQSSGLYSL | ID NO: | SGFTFS | (SEQ | ITCRA | INCKS | GTASV |
| | SYDMSW | SSVVTVPSSSLGT | 1546) | SYWMHW | ID NO: | SQSIS | SQSVL | VCLLN |
| | VRQAPG | QTYICNVNHKPSN | | VRQAPG | 22) | SSLAW | YSPNN | NFYPR |
| | KGLEWV | TKVDKKVEPKSCD | | KGLEWV | | YQQKP | KNYLA | EAKVQ |
| | SGITIS | KTHTCPPCPAPEA | | SYISGS | | GKAPK | WYQQK | WKVDN |
| | GGSTYY | AGAPSVFLFPPKP | | GGYTNY | | LLIYA | PGQPP | ALQSG |
| | ADSVKG | KDTLMISRTPEVT | | ADSVKG | | ASSLQ | KLLIY | NSQES |
| | RFTISR | CVVVDVSHEDPEV | | RFTISR | | SGVPS | WASTR | VTEQD |
| | DNSKNT | KFNWYVDGVEVHN | | DNSKNT | | RFSGS | ESGVP | SKDST |
| | LYLQMN | AKTKPREEQYNST | | LYLQMN | | GSGTD | DRFSG | YSLSS |
| | SLRAED | YRVVSVLTVLHQD | | SLRAED | | FTLTI | SGSGT | TLTLS |
| | TAVYYC | WLNGKEYKCKVSN | | TAVYYC | | SSLQP | DFTLT | KADYE |
| | ARGRGG | KALPAPIEKTISK | | ARDRPY | | EDFAT | ISSLQ | KHKVY |
| | SGWLDY | AKGQPREPQVYTL | | YYDLDV | | YYCQQ | AEDVA | ACEVT |
| | WGQGTT | PPSREEMTKNQVS | | WGKGTT | | YKSYP | VYYCQ | HQGLS |
| | VTVSS | LTCLVKGFYPSDI | | VTVSS | | VTFGQ | QYYTT | SPVTK |
| | (SEQ | AVEWESNGQPENN | | (SEQ | | GTKVE | PPTFG | SFNRG |
| | ID NO: | YKTTPPVLDSDGS | | ID NO: | | IK | QGTRL | EC |
| | 1476) | FFLYSKLTVDKSR | | 1480) | | (SEQ | EIK | (SEQ |
| | | WQQGNVFSCSVMH | | | | ID | (SEQ | ID |
| | | EALHNHYTQKSLS | | | | NO: | ID | NO: |
| | | LSPG (SEQ ID | | | | 1367) | NO: | 45) |
| | | NO: 44) | | | | | 1359) | |
| PMAB | EVQLLE | ASTKGPSVFPLAP | GGGSEG | EVQLLE | GGGGSG | DIQMT | DIVMT | RTVAA |
| 72 | SGGGLV | SSKSTSGGTAALG | GGSEGG | SGGGLV | GGGSGG | QSPSS | QSPDS | PSVFI |
| | QPGGSL | CLVKDYFPEPVTV | GSE | QPGGSL | GGSGGG | LSASV | LAVSL | FPPSD |
| | RLSCAA | SWNSGALTSGVHT | (SEQ | RLSCAA | GS | GDRVT | GERAT | EQLKS |
| | SGFTFS | FPAVLQSSGLYSL | ID NO: | SGFTFS | (SEQ | ITCRA | INCKS | GTASV |
| | SYDMSW | SSVVTVPSSSLGT | 1546) | SYWMHW | ID NO: | SQSIS | SQSVL | VCLLN |
| | VRQAPG | QTYICNVNHKPSN | | VRQAPG | 22) | SSLAW | YSPNN | NFYPR |
| | KGLEWV | TKVDKKVEPKSCD | | KCLEWV | | YQQKP | KNYLA | EAKVQ |
| | SGITIS | KTHTCPPCPAPEA | | SYISGS | | GKAPK | WYQQK | WKVDN |
| | GGSTYY | AGAPSVFLFPPKP | | GGYTNY | | LLIYA | PGQPP | ALQSG |
| | ADSVKG | KDTLMISRTPEVT | | ADSVKG | | ASSLQ | KLLIY | NSQES |
| | RFTISR | CVVVDVSHEDPEV | | RFTISR | | SGVPS | WASTR | VTEQD |
| | DNSKNT | KFNWYVDGVEVHN | | DNSKNT | | RFSGS | ESGVP | SKDST |
| | LYLQMN | AKTKPREEQYNST | | LYLQMN | | GSGTD | DRFSG | YSLSS |
| | SLRAED | YRVVSVLTVLHQD | | SLRAED | | FTLTI | SGSGT | TLTLS |
| | TAVYYC | WLNGKEYKCKVSN | | TAVYYC | | SSLQP | DFTLT | KADYE |
| | ARGRGG | KALPAPIEKTISK | | ARDRPY | | EDFAT | ISSLQ | KHKVY |
| | SGWLDY | AKGQPREPQVYTL | | YYDMDV | | YYCQQ | AEDVA | ACEVT |
| | WGQGTT | PPSREEMTKNQVS | | WGKGTT | | YKSYP | VYYCQ | HQGLS |
| | VTVSS | LTCLVKGFYPSDI | | VTVSS | | VTFGC | QYYTT | SPVTK |
| | (SEQ | AVEWESNGQPENN | | (SEQ | | GTKVE | PPTFG | SFNRG |
| | ID NO: | YKTTPPVLDSDGS | | ID NO: | | IK | QGTRL | EC |
| | 1476) | FFLYSKLTVDKSR | | 1542) | | (SEQ | EIK | (SEQ |
| | | WQQGNVFSCSVMH | | | | ID | (SEQ | ID |
| | | EALHNHYTQKSLS | | | | NO: | ID | NO: |
| | | LSPG (SEQ ID | | | | 1543) | NO: | 45) |
| | | NO: 44) | | | | | 1359) | |
| PMAB | EVQLVQ | ASTKGPSVFPLAP | GGGSEG | EVQLLE | GGGGSG | DIQMT | DIQMT | RTVAA |
| 73 | SGAEVK | SSKSTSGGTAALG | GGSEGG | SGGGLV | GGGSGG | QSPSS | QSPSS | PSVFI |
| | KPGASV | CLVKDYFPEPVTV | GSE | QPGGSL | GGSGGG | LSASV | LSASV | FPPSD |
| | KVSCKA | SWNSGALTSGVHT | (SEQ | RLSCAA | GS | GDRVT | GDRVT | EQLKS |
| | SGYSFT | FPAVLQSSGLYSL | ID NO: | SGFTFS | (SEQ | ITCRA | ITCRA | GTASV |
| | SYYMHW | SSVVTVPSSSLGT | 1546) | SYWMHW | ID NO: | SQSIS | SQSIS | VCLLN |
| | VRQAPG | QTYICNVNHKPSN | | VRQAPG | 22) | SSLAW | SYLAW | NFYPR |
| | QGLEWM | TKVDKKVEPKSCD | | KCLEWV | | YQQKP | YQQKP | EAKVQ |
| | GIINPS | KTHTCPPCPAPEA | | SYISGS | | GKAPK | GKAPK | WKVDN |
| | GGSTSY | AGAPSVFLFPPKP | | GGYTNY | | LLIYA | LLIYA | ALQSG |
| | AQKFQG | KDTLMISRTPEVT | | ADSVKG | | ASSLQ | ASSLQ | NSQES |
| | RVTMTR | CVVVDVSHEDPEV | | RFTISR | | SGVPS | SGVPS | VTEQD |
| | DTSTST | KFNWYVDGVEVHN | | DNSKNT | | RFSGS | RFSGS | SKDST |
| | VYMELS | AKTKPREEQYNST | | LYLQMN | | GSGTD | GSGTD | YSLSS |
| | SLRSED | YRVVSVLTVLHQD | | SLRAED | | FTLTI | FTLTI | TLTLS |
| | TAVYYC | WLNGKEYKCKVSN | | TAVYYC | | SSLQP | SSLQP | KADYE |
| | ASGWVY | KALPAPIEKTISK | | ARDRPY | | EDFAT | EDFAT | KHKVY |
| | WGQGTL | AKGQPREPQVYTL | | YYDMDV | | YYCQQ | YYCQQ | ACEVT |
| | VTVSS | PPSREEMTKNQVS | | WGKGTT | | YKSYP | SYSTP | HQGLS |
| | (SEQ | LTCLVKGFYPSDI | | VTVSS | | VTFGC | PTFGP | SPVTK |
| | ID NO: | AVEWESNGQPENN | | (SEQ | | GTKVE | GTKVD | SFNRG |
| | 1478) | YKTTPPVLDSDGS | | ID NO: | | IK | IK | EC |
| | | FFLYSKLTVDKSR | | 1542) | | (SEQ | (SEQ | (SEQ |
| | | WQQGNVFSCSVMH | | | | ID | ID | ID |
| | | EALHNHYTQKSLS | | | | NO: | NO: | NO: |
| | | LSPG (SEQ ID | | | | 1543) | 1479) | 45) |
| | | NO: 44) | | | | | | |
| PMAB | EVQLLE | ASTKGPSVFPLAP | GGGSEG | EVQLLE | GGGGSG | DIQMT | DIVMT | RTVAA |
| 74 | SGGGLV | SSKSTSGGTAALG | GGSEGG | SGGGLV | GGGSGG | QSPSS | QSPDS | PSVFI |
| | QPGGSL | CLVKDYFPEPVTV | GSE | QPGGSL | GGSGGG | LSASV | LAVSL | FPPSD |
| | RLSCAA | SWNSGALTSGVHT | (SEQ | RLSCAA | GS | GDRVT | GERAT | EQLKS |
| | SGFTFS | FPAVLQSSGLYSL | ID NO: | SGFTFS | (SEQ | ITCRA | INCKS | GTASV |
| | SYDMSW | SSVVTVPSSSLGT | 1546) | SYWMHW | ID NO: | SQSIS | SQSVL | VCLLN |
| | VRQAPG | QTYICNVNHKPSN | | VRQAPG | 22) | SSLAW | YSPNN | NFYPR |
| | KGLEWV | TKVDKKVEPKSCD | | KCLEWV | | YQQKP | KNYLA | EAKVQ |
| | SGITIS | KTHTCPPCPAPEA | | SYISGS | | GKAPK | WYQQK | WKVDN |
| | GGSTYY | AGAPSVFLFPPKP | | GGYTNY | | LLIYA | PGQPP | ALQSG |
| | ADSVKG | KDTLMISRTPEVT | | ADSVKG | | ASSLQ | KLLIY | NSQES |
| | RFTISR | CVVVDVSHEDPEV | | RFTISR | | SGVPS | WASTR | VTEQD |
| | DNSKNT | KFNWYVDGVEVHN | | DNSKNT | | RFSGS | ESGVP | SKDST |
| | LYLQMN | AKTKPREEQYNST | | LYLQMN | | GSGTD | DRFSG | YSLSS |
| | SLRAED | YRVVSVLTVLHQD | | SLRAED | | FTLTI | SGSGT | TLTLS |
| | TAVYYC | WLNGKEYKCKVSN | | TAVYYC | | SSLQP | DFTLT | KADYE |
| | ARGRGG | KALPAPIEKTISK | | ARDRPY | | EDFAT | ISSLQ | KHKVY |
| | SGWLDY | AKGQPREPQVYTL | | YYDIDV | | YYCQQ | AEDVA | ACEVT |
| | WGQGTT | PPSREEMTKNQVS | | WGKGTT | | YKSYP | VYYCQ | HQGLS |
| | VTVSS | LTCLVKGFYPSDI | | VTVSS | | VTFGC | QYYTT | SPVTK |
| | (SEQ | AVEWESNGQPENN | | (SEQ | | GTKVE | PPTFG | SFNRG |
| | ID NO: | YKTTPPVLDSDGS | | ID NO: | | IK | QGTRL | EC |
| | 1476) | FFLYSKLTVDKSR | | 1544) | | (SEQ | EIK | (SEQ |
| | | WQQGNVFSCSVMH | | | | ID | (SEQ | ID |
| | | EALHNHYTQKSLS | | | | NO: | ID | NO: |
| | | LSPG (SEQ ID | | | | 1543) | NO: | 45) |
| | | NO: 44) | | | | | 1359) | |
| PMAB | EVQLVQ | ASTKGPSVFPLAP | GGGSEG | EVQLLE | GGGGSG | DIQMT | DIQMT | RTVAA |
| 75 | SGAEVK | SSKSTSGGTAALG | GGSEGG | SGGGLV | GGGSGG | QSPSS | QSPSS | PSVFI |
| | KPGASV | CLVKDYFPEPVTV | GSE | QPGGSL | GGSGGG | LSASV | LSASV | FPPSD |
| | KVSCKA | SWNSGALTSGVHT | (SEQ | RLSCAA | GS | GDRVT | GDRVT | EQLKS |
| | SGYSFT | FPAVLQSSGLYSL | ID NO: | SGFTFS | (SEQ | ITCRA | ITCRA | GTASV |
| | SYYMHW | SSVVTVPSSSLGT | 1546) | SYWMHW | ID NO: | SQSIS | SQSIS | VCLLN |
| | VRQAPG | QTYICNVNHKPSN | | VRQAPG | 22) | SSLAW | SYLAW | NFYPR |
| | QGLEWM | TKVDKKVEPKSCD | | KCLEWV | | YQQKP | YQQKP | EAKVQ |
| | GIINPS | KTHTCPPCPAPEA | | SYISGS | | GKAPK | GKAPK | WKVDN |
| | GGSTSY | AGAPSVFLFPPKP | | GGYTNY | | LLIYA | LLIYA | ALQSG |
| | AQKFQG | KDTLMISRTPEVT | | ADSVKG | | ASSLQ | ASSLQ | NSQES |
| | RVTMTR | CVVVDVSHEDPEV | | RFTISR | | SGVPS | SGVPS | VTEQD |
| | DISTST | KFNWYVDGVEVHN | | DNSKNT | | RFSGS | RFSGS | SKDST |
| | VYMELS | AKTKPREEQYNST | | LYLQMN | | GSGTD | GSGTD | YSLSS |
| | SLRSED | YRVVSVLTVLHQD | | SLRAED | | FTLTI | FTLTI | TLTLS |
| | TAVYYC | WLNGKEYKCKVSN | | TAVYYC | | SSLQP | SSLQP | KADYE |
| | ASGWVY | KALPAPIEKTISK | | ARDRPY | | EDFAT | EDFAT | KHKVY |
| | WGQGTL | AKGQPREPQVYTL | | YYDIDV | | YYCQQ | YYCQQ | ACEVT |
| | VTVSS | PPSREEMTKNQVS | | WGKGTT | | YKSYP | SYSTP | HQGLS |
| | (SEQ | LTCLVKGFYPSDI | | VTVSS | | VTFGC | PTFGP | SPVTK |
| | ID NO: | AVEWESNGQPENN | | (SEQ | | GTKVE | GTKVD | SFNRG |
| | 1478) | YKTTPPVLDSDGS | | ID NO: | | IK | IK | EC |
| | | FFLYSKLTVDKSR | | 1544) | | (SEQ | (SEQ | (SEQ |
| | | WQQGNVFSCSVMH | | | | ID | ID | ID |
| | | EALHNHYTQKSLS | | | | NO: | NO: | NO: |
| | | LSPG (SEQ ID | | | | 1543) | 1479) | 45) |
| | | NO: 44) | | | | | | |
| PMAB | EVQLVQ | ASTKGPSVFPLAP | GGGSEG | EVQLLE | GGGGSG | DIQMT | DIQMT | RTVAA |
| 76 | SGAEVK | SSKSTSGGTAALG | GGSEGG | SGGGLV | GGGSGG | QSPSS | QSPSS | PSVFI |
| | KPGASV | CLVKDYFPEPVTV | GSE | QPGGSL | GGSGGG | LSASV | LSASV | FPPSD |
| | KVSCKA | SWNSGALTSGVHT | (SEQ | RLSCAA | GS | GDRVT | GDRVT | EQLKS |
| | SGYSFT | FPAVLQSSGLYSL | ID NO: | SGFTFS | (SEQ | ITCRA | ITCRA | GTASV |
| | SYYMHW | SSVVTVPSSSLGT | 1546) | SYWMHW | ID NO: | SQSIS | SQSIS | VCLLN |
| | VRQAPG | QTYICNVNHKPSN | | VRQAPG | 22) | SSLAW | SYLAW | NFYPR |
| | QGLEWM | TKVDKKVEPKSCD | | KCLEWV | | YQQKP | YQQKP | EAKVQ |
| | GIINPS | KTHTCPPCPAPEA | | SYISGS | | GKAPK | GKAPK | WKVDN |
| | GGSTSY | AGAPSVFLFPPKP | | GGYTNY | | LLIYA | LLIYA | ALQSG |
| | AQKFQG | KDTLMISRTPEVT | | ADSVKG | | ASSLQ | ASSLQ | NSQES |
| | RVTMTR | CVVVDVSHEDPEV | | RFTISR | | SGVPS | SGVPS | VTEQD |
| | DTSTST | KFNWYVDGVEVHN | | DNSKNT | | RFSGS | RFSGS | SKDST |
| | VYMELS | AKTKPREEQYNST | | LYLQMN | | GSGTD | GSGTD | YSLSS |
| | SLRSED | YRVVSVLTVLHQD | | SLRAED | | FTLTI | FTLTI | TLTLS |
| | TAVYYC | WLNGKEYKCKVSN | | TAVYYC | | SSLQP | SSLQP | KADYE |
| | ASGWVY | KALPAPIEKTISK | | ARDRPY | | EDFAT | EDFAT | KHKVY |
| | WGQGTL | AKGQPREPQVYTL | | YYDLDV | | YYCQQ | YYCQQ | ACEVT |
| | VTVSS | PPSREEMTKNQVS | | WGKGTT | | YKSYP | SYSTP | HQGLS |
| | (SEQ | LTCLVKGFYPSDI | | VTVSS | | VTFGC | PTFGP | SPVTK |
| | ID NO: | AVEWESNGQPENN | | (SEQ | | GTKVE | GTKVD | SFNRG |
| | 1478) | YKTTPPVLDSDGS | | ID NO: | | IK | IK | EC |
| | | FFLYSKLTVDKSR | | 1545) | | (SEQ | (SEQ | (SEQ |
| | | WQQGNVFSCSVMH | | | | ID | ID | ID |
| | | EALHNHYTQKSLS | | | | NO: | NO: | NO: |
| | | LSPG (SEQ ID | | | | 1543) | 1479) | 45) |
| | | NO: 44) | | | | | | |
| PMAB | EVQLLE | ASTKGPSVFPLAP | GGGSEG | EVQLLE | GGGGSG | DIQMT | DIVMT | RTVAA |
| 77 | SGGGLV | SSKSTSGGTAALG | GGSEGG | SGGGLV | GGGSGG | QSPSS | QSPDS | PSVFI |
| | QPGGSL | CLVKDYFPEPVTV | GSE | QPGGSL | GGSGGG | LSASV | LAVSL | FPPSD |
| | RLSCAA | SWNSGALTSGVHT | (SEQ | RLSCAA | GS | GDRVT | GERAT | EQLKS |
| | SGFTFS | FPAVLQSSGLYSL | ID NO: | SGFTFS | (SEQ | ITCRA | INCKS | GTASV |
| | SYDMSW | SSVVTVPSSSLGT | 1546) | SYWMHW | ID NO: | SQSIS | SQSVL | VCLLN |
| | VRQAPG | QTYICNVNHKPSN | | VRQAPG | 22) | SSLAW | YSPNN | NFYPR |
| | KGLEWV | TKVDKKVEPKSCD | | KCLEWV | | YQQKP | KNYLA | EAKVQ |
| | SGITIS | KTHTCPPCPAPEA | | SYISGS | | GKAPK | WYQQK | WKVDN |
| | GGSTYY | AGAPSVFLFPPKP | | GGYTNY | | LLIYA | PGQPP | ALQSG |
| | ADSVKG | KDTLMISRTPEVT | | ADSVKG | | ASSLQ | KLLIY | NSQES |
| | RFTISR | CVVVDVSHEDPEV | | RFTISR | | SGVPS | WASTR | VTEQD |
| | DNSKNT | KFNWYVDGVEVHN | | DNSKNT | | RFSGS | ESGVP | SKDST |
| | LYLQMN | AKTKPREEQYNST | | LYLQMN | | GSGTD | DRFSG | YSLSS |
| | SLRAED | YRVVSVLTVLHQD | | SLRAED | | FTLTI | SGSGT | TLTLS |
| | TAVYYC | WLNGKEYKCKVSN | | TAVYYC | | SSLQP | DFTLT | KADYE |
| | ARGRGG | KALPAPIEKTISK | | ARDRPY | | EDFAT | ISSLQ | KHKVY |
| | SGWLDY | AKGQPREPQVYTL | | YYDLDV | | YYCQQ | AEDVA | ACEVT |
| | WGQGTT | PPSREEMTKNQVS | | WGKGTT | | YKSYP | VYYCQ | HQGLS |
| | VTVSS | LTCLVKGFYPSDI | | VTVSS | | VTFGC | QYYTT | SPVTK |
| | (SEQ | AVEWESNGQPENN | | (SEQ | | GTKVE | PPTFG | SFNRG |
| | ID NO: | YKTTPPVLDSDGS | | ID NO: | | IK | QGTRL | EC |
| | 1476) | FFLYSKLTVDKSR | | 1545) | | (SEQ | EIK | (SEQ |
| | | WQQGNVFSCSVMH | | | | ID | (SEQ | ID |
| | | EALHNHYTQKSLS | | | | NO: | ID | NO: |
| | | LSPG (SEQ ID | | | | 1543) | NO: | 45) |
| | | NO: 44) | | | | | 1359) | |

[0426] In some embodiments, the therapeutic compound comprises one or more sequences, or a combination thereof, selected from the Table 12.

[0427] In some embodiments, the PD-1-MAdCAM antibody comprises an anti-PD-1 Fab as provided for in the following table:

TABLE 13

| Clone | | | | | | | | |
|---|---|---|---|---|---|---|---|---|
| (Fab) | Fab VH Seq | Fab VL Seq | HCDR1 | HCDR2 | HCDR3 | LCDR1 | LCDR2 | LCDR3 |
| PMAB1 | EVQLLESGGG | DIVMTQSPDS | FTFSN | VSGIT | ARGRG | KSSQS | WASTR | QQYYT |
| | LVQPGGSLRL | LAVSLGERAT | SDMS | ISGGS | GSGWL | VLYSP | ES | TPPT |
| | SCAASGFTFS | INCKSSQSVL | (SEQ | TYYA | DY | NNKNY | (SEQ | (SEQ |
| | NSDMSWVRQA | YSPNNKNYLA | ID | (SEQ | (SEQ | LA | ID | ID |
| | PGKGLEWVSG | WYQQKPGQPP | NO: | ID | ID | (SEQ | NO: | NO: |
| | ITISGGSTYY | KLLIYWASTR | 1481) | NO: | NO: | ID | 1485) | 1486) |
| | ADSVKGRFTI | ESGVPDRFSG | | 1482) | 1483) | NO: | | |
| | SRDNSKNTLY | SGSGTDFTLT | | | | 1484) | | |
| | LQMNSLRAED | ISSLQAEDVA | | | | | | |
| | TAVYYCARGR | VYYCQQYYTT | | | | | | |
| | GGSGWLDYWG | PPTFGQGTRL | | | | | | |
| | QGTLVTVSS | EIK (SEQ | | | | | | |
| | (SEQ ID | ID NO: | | | | | | |
| | NO: 1438) | 1359) | | | | | | |
| PMAB15 | EVQLLESGGG | DIVMTQSPDS | FTFSS | VSGIT | ARGRG | KSSQS | WASTR | QQYYT |
| | LVQPGGSLRL | LAVSLGERAT | YDMS | ISGGS | GSGWL | VLYSP | ES | TPPT |
| | SCAASGFTFS | INCKSSQSVL | (SEQ | TYYA | DY | NNKNY | (SEQ | (SEQ |
| | SYDMSWVRQA | YSPNNKNYLA | ID | (SEQ | (SEQ | LA | ID | ID |
| | PGKGLEWVSG | WYQQKPGQPP | NO: | ID | ID | (SEQ | NO: | NO: |
| | ITISGGSTYY | KLLIYWASTR | 1487) | NO: | NO: | ID | 1485) | 1486) |
| | ADSVKGRFTI | ESGVPDRFSG | | 1482) | 1483) | NO: | | |
| | SRDNSKNTLY | SGSGTDFTLT | | | | 1484) | | |
| | LQMNSLRAED | ISSLQAEDVA | | | | | | |
| | TAVYYCARGR | VYYCQQYYTT | | | | | | |
| | GGSGWLDYWG | PPTFGQGTRL | | | | | | |
| | QGTLVTVSS | EIK (SEQ | | | | | | |
| | (SEQ ID | ID NO: | | | | | | |
| | NO: 1446) | 1359) | | | | | | |
| PMAB17 | EVQLLESGGG | DIVMTQSPDS | FTFSS | VSGIT | ARGRG | KSSQS | WASTR | QQYYT |
| | LVQPGGSLRL | LAVSLGERAT | YDMS | ISGGS | GSGWL | VLYSP | ES | TPPT |
| | SCAASGFTES | INCKSSQSVL | (SEQ | TYYA | DY | NNKNY | (SEQ | (SEQ |
| | SYDMSWVRQA | YSPNNKNYLA | ID | (SEQ | (SEQ | LA | ID | ID |
| | PGKGLEWVSG | WYQQKPGQPP | NO: | ID | ID | (SEQ | NO: | NO: |
| | ITISGGSTYY | KLLIYWASTR | 1487) | NO: | NO: | ID | 1485) | 1486) |
| | ADSVKGRFTI | ESGVPDRESG | | 1482) | 1483) | NO: | | |
| | SRDNSKNTLY | SGSGTDFTLT | | | | 1484) | | |
| | LQMNSLRAED | ISSLQAEDVA | | | | | | |
| | TAVYYCARGR | VYYCQQYYTT | | | | | | |
| | GGSGWLDYWG | PPTFGQGTRL | | | | | | |
| | QGTDVTVSS | EIK (SEQ | | | | | | |
| | (SEQ ID | ID NO: | | | | | | |
| | NO: 1447) | 1359) | | | | | | |
| PMAB18 | QVQLVQSGAE | DIQMTQSPSS | YSFTT | MGIIA | ASGWV | QASRD | AASSL | QQSYS |
| | VKKPGASVKV | LSASVGDRVT | YYMH | PSGGS | Y | IKNYL | QS | TPPT |
| | SCKASGYSFT | ITCQASRDIK | (SEQ | TSYA | (SEQ | A | (SEQ | (SEQ |
| | TYYMHWVRQA | NYLAWYQQKP | ID | (SEQ | ID | (SEQ | ID | ID |
| | PGQGLEWMGI | GKAPKLLIYA | NO: | ID | NO: | ID | NO: | NO: |
| | IAPSGGSTSY | ASSLQSGVPS | 628) | NO: | 1489) | NO: | 1491) | 1492) |
| | AQKFQGRVTM | RFSGSGSGTD | | 1488) | | 1490) | | |
| | TRDTSTSTVY | FTLTISSLQP | | | | | | |
| | MELSSLRSED | EDFATYYCQQ | | | | | | |
| | TAVYYCASGW | SYSTPPTFGP | | | | | | |
| | VYWGQGTLVT | GTKVDIK | | | | | | |
| | VSS (SEQ | (SEQ ID | | | | | | |
| | ID NO: | NO: 1449) | | | | | | |
| | 1448) | | | | | | | |
| PMAB53 | EVQLLESGGG | DIVMTQSPDS | FTFSS | VSGIT | ARGRG | KSSQS | WASTR | QQYYT |
| | LVQPGGSLRL | LAVSLGERAT | YDMS | ISGGS | GSGWL | VLYSP | ES | TPPT |
| | SCAASGFTES | INCKSSQSVL | (SEQ | TYYA | DY | NNKNY | (SEQ | (SEQ |
| | SYDMSWVRQA | YSPNNKNYLA | ID | (SEQ | (SEQ | LA | ID | ID |
| | PGKGLEWVSG | WYQQKPGQPP | NO: | ID | ID | (SEQ | NO: | NO: |
| | ITISGGSTYY | KLLIYWASTR | 1487) | NO: | NO: | ID | 1485) | 1486) |
| | ADSVKGRFTI | ESGVPDRFSG | | 1482) | 1483) | NO: | | |
| | SRDNSKNTLY | SGSGTDFTLT | | | | 1484) | | |
| | LQMNSLRAED | ISSLQAEDVA | | | | | | |
| | TAVYYCARGR | VYYCQQYYTT | | | | | | |
| | GGSGWLDYWG | PPTFGQGTRL | | | | | | |
| | QGTTVTVSS | EIK (SEQ | | | | | | |
| | (SEQ ID | ID NO: | | | | | | |
| | NO: 1476) | 1359) | | | | | | |
| PMAB54 | EVQLVQSGAE | DIQMTQSPSS | YSFTS | MGIIN | ASGWV | RASQS | AASSL | QQSYS |
| | VKKPGASVKV | LSASVGDRVT | YYMH | PSGGS | Y | ISSYL | QS | TPPT |
| | SCKASGYSFT | ITCRASQSIS | (SEQ | TSYA | (SEQ | A | (SEQ | (SEQ |
| | SYYMHWVRQA | SYLAWYQQKP | ID | (SEQ | ID | (SEQ | ID | ID |
| | PGQGLEWMGI | GKAPKLLIYA | NO: | ID | NO: | ID | NO: | NO: |
| | INPSGGSTSY | ASSLQSGVPS | 766) | NO: | 1489) | NO: | 1491) | 1492) |
| | AQKFQGRVTM | RFSGSGSGTD | | 977) | | 1214) | | |
| | TRDTSTSTVY | FTLTISSLQP | | | | | | |
| | MELSSLRSED | EDFATYYCQQ | | | | | | |
| | TAVYYCASGW | SYSTPPTFGP | | | | | | |
| | VYWGQGTLVT | GTKVDIK | | | | | | |
| | VSS (SEQ | (SEQ ID | | | | | | |
| | ID NO: | NO: 1479) | | | | | | |
| | 1478) | | | | | | | |

[0428] In some embodiments, the therapeutic compound comprises one or more sequences, or a combination thereof, selected from the Table 13.

[0429] In some embodiments, the PD-1-MAdCAM antibody comprises an anti-MAdCAM scFv as provided for in the following table:

TABLE 14

| Clone | ScFv VH | Fab VL | | | | | | |
|---|---|---|---|---|---|---|---|---|
| (scFv) | Seq | Seq | HCDR1 | HCDR2 | HCDR3 | LCDR1 | LCDR2 | LCDR3 |
| PMAB1 | EVQLLESGGG | DIQMTQSPSS | FTFSD | SYISG | CARDR | RASQS | SSLQS | QQYKS |
| | LVQPGGSLRL | LSASVGDRVT | FWMH | DSGYT | PYYYY | VSRSL | (SEQ | YPVT |
| | SCAASGFTES | ITCRASQSVS | (SEQ | NYA | MDVW | A | ID | (SEQ |
| | DFWMHWVRQA | RSLAWYQQKP | ID | (SEQ | (SEQ | (SEQ | NO: | ID |
| | PGKGLEWISY | GKAPKLLIYA | NO: | ID | ID | ID | 1497) | NO: |
| | ISGDSGYTNY | ASSLQSGVPS | 1493) | NO: | NO: | NO: | | 1498) |
| | ADSVKGRFTI | RFSGSGSGTD | | 1494) | 1495) | 1496) | | |
| | SRDNSKNTLY | FTLTISSLQP | | | | | | |
| | LQMNSLRAED | EDFATYYCQQ | | | | | | |
| | TAVYYCARDR | YKSYPVTFGQ | | | | | | |
| | PYYYYMDVWG | GTKVEIK | | | | | | |
| | KGTTVTVSS | (SEQ ID | | | | | | |
| | (SEQ ID | NO: 592) | | | | | | |
| | NO: 591) | | | | | | | |
| PMAB2 | EVQLLESGGG | DIQMTQSPSS | FTFSS | SAISG | CARDR | RASQS | SSLQS | QQYKS |
| | LVQPGGSLRL | LSASVGDRVT | YWMH | SSGST | PYGYY | ISSSL | (SEQ | YPVT |
| | SCAASGFTFS | ITCRASQSIS | (SEQ | YYA | MDVW | A | ID | (SEQ |
| | SYWMHWVRQA | SSLAWYQQKP | ID | (SEQ | (SEQ | (SEQ | NO: | ID |
| | PGKGLEWVSA | GKAPKLLIYA | NO: | ID | ID | ID | 1497) | NO: |
| | ISGSSGSTYY | ASSLQSGVPS | 1499) | NO: | NO: | NO: | | 1498) |
| | ADSVKGRFTI | RFSGSGSGTD | | 1500) | 1501) | 1502) | | |
| | SRDNSKNTLY | FTLTISSLQP | | | | | | |
| | LQMNSLRAED | EDFATYYCQQ | | | | | | |
| | TAVYYCARDR | YKSYPVTFGQ | | | | | | |
| | PYGYYMDVWG | GTKVEIK | | | | | | |
| | KGTTVTVSS | (SEQ ID | | | | | | |
| | (SEQ ID | NO: 1367) | | | | | | |
| | NO: 1347) | | | | | | | |
| PMAB3 | EVQLLESGGG | DIQMTQSPSS | FTFSS | SAISG | CARDR | RASQS | SSLQS | QQYKS |
| | LVQPGGSLRL | LSASVGDRVT | YWMH | SSGST | PYYYY | ISSSL | (SEQ | YPVT |
| | SCAASGFTES | ITCRASQSIS | (SEQ | YYA | MDVW | A | ID | (SEQ |
| | SYWMHWVRQA | SSLAWYQQKP | ID | (SEQ | (SEQ | (SEQ | NO: | ID |
| | PGKGLEWVSA | GKAPKLLIYA | NO: | ID | ID | ID | 1497) | NO: |
| | ISGSSGSTYY | ASSLQSGVPS | 1499) | NO: | NO: | NO: | | 1498) |
| | ADSVKGRFTI | RFSGSGSGTD | | 1500) | 1503) | 1502) | | |
| | SRDNSKNTLY | FTLTISSLQP | | | | | | |
| | LQMNSLRAED | EDFATYYCQQ | | | | | | |
| | TAVYYCARDR | YKSYPVTFGQ | | | | | | |
| | PYYYYMDVWG | GTKVEIK | | | | | | |
| | KGTTVTVSS | (SEQ ID | | | | | | |
| | (SEQ ID | NO: 1367) | | | | | | |
| | NO: 1439) | | | | | | | |
| PMAB5 | EVQLLESGGG | DIQMTQSPSS | FTFSS | SAISG | CARDR | RASQS | SSLQS | QQYKS |
| | LVQPGGSLRL | LSASVGDRVT | YWMH | SSGST | PYYYY | ISRSL | (SEQ | YPVT |
| | SCAASGFTFS | ITCRASQSIS | (SEQ | YYA | MDVW | A | ID | (SEQ |
| | SYWMHWVRQA | RSLAWYQQKP | ID | (SEQ | (SEQ | (SEQ | NO: | ID |
| | PGKGLEWVSA | GKAPKLLIYA | NO: | ID | ID | ID | 1497) | NO: |
| | ISGSSGSTYY | ASSLQSGVPS | 1499) | NO: | NO: | NO: | | 1498) |
| | ADSVKGRFTI | RFSGSGSGTD | | 1500) | 1503) | 1504) | | |
| | SRDNSKNTLY | FTLTISSLQP | | | | | | |
| | LQMNSLRAED | EDFATYYCQQ | | | | | | |
| | TAVYYCARDR | YKSYPVTFGQ | | | | | | |
| | PYYYYMDVWG | GTKVEIK | | | | | | |
| | KGTTVTVSS | (SEQ ID | | | | | | |
| | (SEQ ID | NO: 1363) | | | | | | |
| | NO: 1439) | | | | | | | |
| PMAB6 | EVQLLESGGG | DIQMTQSPSS | FTFSS | SAISG | CARDR | RASQS | SSLQS | QQYKS |
| | LVQPGGSLRL | LSASVGDRVT | YWMH | SGGST | PYGYY | ISSSL | (SEQ | YPVT |
| | SCAASGFTFS | ITCRASQSIS | (SEQ | YYA | MDVW | A | ID | (SEQ |
| | SYWMHWVRQA | SSLAWYQQKP | ID | (SEQ | (SEQ | (SEQ | NO: | ID |
| | PGKGLEWISA | GKAPKLLIYA | NO: | ID | ID | ID | 1497) | NO: |
| | ISGSGGSTYY | ASSLQSGVPS | 1499) | NO: | NO: | NO: | | 1498) |
| | ADSVKGRFTI | RFSGSGSGTD | | 1505) | 1501) | 1502) | | |
| | SRDNSKNTLY | FTLTISSLQP | | | | | | |
| | LQMNSLRAED | EDFATYYCQQ | | | | | | |
| | TAVYYCARDR | YKSYPVTFGQ | | | | | | |
| | PYGYYMDVWG | GTKVEIK | | | | | | |
| | KGTTVTVSS | (SEQ ID | | | | | | |
| | (SEQ ID | NO: 1367) | | | | | | |
| | NO: 1440) | | | | | | | |
| PMAB7 | EVQLLESGGG | DIQMTQSPSS | FTFSS | SAISG | CARDR | RASQS | SSLQS | QQYKS |
| | LVQPGGSLRL | LSASVGDRVT | YWMH | SGGST | PYYYY | ISSSL | (SEQ | YPVT |
| | SCAASGFTFS | ITCRASQSIS | (SEQ | YYA | MDVW | A | ID | (SEQ |
| | SYWMHWVRQA | SSLAWYQQKP | ID | (SEQ | (SEQ | (SEQ | NO: | ID |
| | PGKGLEWISA | GKAPKLLIYA | NO: | ID | ID | ID | 1497) | NO: |
| | ISGSGGSTYY | ASSLQSGVPS | 1499) | NO: | NO: | NO: | | 1498) |
| | ADSVKGRFTI | RFSGSGSGTD | | 1505) | 1503) | 1502) | | |
| | SRDNSKNTLY | FTLTISSLQP | | | | | | |
| | LQMNSLRAED | EDFATYYCQQ | | | | | | |
| | TAVYYCARDR | YKSYPVTFGQ | | | | | | |
| | PYYYYMDVWG | GTKVEIK | | | | | | |
| | KGTTVTVSS | (SEQ ID | | | | | | |
| | (SEQ ID | NO: 1367) | | | | | | |
| | NO: 1441) | | | | | | | |
| PMAB8 | EVQLLESGGG | DIQMTQSPSS | FTFSS | SAISG | CARDR | RASQS | SSLQS | QQYKS |
| | LVQPGGSLRL | LSASVGDRVT | YWMH | SGGST | PYGYY | ISRSL | (SEQ | YPVT |
| | SCAASGFTFS | ITCRASQSIS | (SEQ | YYA | MDVW | A | ID | (SEQ |
| | SYWMHWVRQA | RSLAWYQQKP | ID | (SEQ | (SEQ | (SEQ | NO: | ID |
| | PGKGLEWISA | GKAPKLLIYA | NO: | ID | ID | ID | 1497) | NO: |
| | ISGSGGSTYY | ASSLQSGVPS | 1499) | NO: | NO: | NO: | | 1498) |
| | ADSVKGRFTI | RFSGSGSGTD | | 1505) | 1501) | 1504) | | |
| | SRDNSKNTLY | FTLTISSLQP | | | | | | |
| | LQMNSLRAED | EDFATYYCQQ | | | | | | |
| | TAVYYCARDR | YKSYPVTFGQ | | | | | | |
| | PYGYYMDVWG | GTKVEIK | | | | | | |
| | KGTTVTVSS | (SEQ ID | | | | | | |
| | (SEQ ID | NO: 1363) | | | | | | |
| | NO: 1440) | | | | | | | |
| PMAB9 | EVQLLESGGG | DIQMTQSPSS | FTFSS | SAISG | CARDR | RASQS | SSLQS | QQYKS |
| | LVQPGGSLRL | LSASVGDRVT | YWMH | SGGST | PYYYY | ISRSL | (SEQ | YPVT |
| | SCAASGFTFS | ITCRASQSIS | (SEQ | YYA | MDVW | A | ID | (SEQ |
| | SYWMHWVRQA | RSLAWYQQKP | ID | (SEQ | (SEQ | (SEQ | NO: | ID |
| | PGKGLEWISA | GKAPKLLIYA | NO: | ID | ID | ID | 1497) | NO: |
| | ISGSGGSTYY | ASSLQSGVPS | 1499) | NO: | NO: | NO: | | 1498) |
| | ADSVKGRFTI | RFSGSGSGTD | | 1505) | 1503) | 1504) | | |
| | SRDNSKNTLY | FTLTISSLQP | | | | | | |
| | LQMNSLRAED | EDFATYYCQQ | | | | | | |
| | TAVYYCARDR | YKSYPVTFGQ | | | | | | |
| | PYYYYMDVWG | GTKVEIK | | | | | | |
| | KGTTVTVSS | (SEQ ID | | | | | | |
| | (SEQ ID | NO: 1363) | | | | | | |
| | NO: 1441) | | | | | | | |
| PMAB10 | EVQLLESGGG | DIQMTQSPSS | FTFSS | SAISG | CARDR | RASQS | SSLQS | QQYKS |
| | LVQPGGSLRL | LSASVGDRVT | YWMH | SGGST | PYGYY | ISSSL | (SEQ | YPVT |
| | SCAASGFTES | ITCRASQSIS | (SEQ | YYA | MDVW | A | ID | (SEQ |
| | SYWMHWVRQA | SSLAWYQQKP | ID | (SEQ | (SEQ | (SEQ | NO: | ID |
| | PGKGLEWVSA | GKAPKLLIYA | NO: | ID | ID | ID | 1497) | NO: |
| | ISGSGGSTYY | ASSLQSGVPS | 1499) | NO: | NO: | NO: | | 1498) |
| | ADSVKGRFTI | RFSGSGSGTD | | 1505) | 1501) | 1502) | | |
| | SRDNSKNTLY | FTLTISSLQP | | | | | | |
| | LQMNSLRAED | EDFATYYCQQ | | | | | | |
| | TAVYYCARDR | YKSYPVTFGQ | | | | | | |
| | PYGYYMDVWG | GTKVEIK | | | | | | |
| | KGTTVTVSS | (SEQ ID | | | | | | |
| | (SEQ ID | NO: 1367) | | | | | | |
| | NO: 1442) | | | | | | | |
| PMAB11 | EVQLLESGGG | DIQMTQSPSS | FTFSS | SAISG | CARDR | RASQS | SSLQS | QQYKS |
| | LVQPGGSLRL | LSASVGDRVT | YWMH | SGGST | PYYYY | ISSSL | (SEQ | YPVT |
| | SCAASGFTES | ITCRASQSIS | (SEQ | YYA | MDVW | A | ID | (SEQ |
| | SYWMHWVRQA | SSLAWYQQKP | ID | (SEQ | (SEQ | (SEQ | NO: | ID |
| | PGKGLEWVSA | GKAPKLLIYA | NO: | ID | ID | ID | 1497) | NO: |
| | ISGSGGSTYY | ASSLQSGVPS | 1499) | NO: | NO: | NO: | | 1498) |
| | ADSVKGRFTI | RFSGSGSGTD | | 1505) | 1503) | 1502) | | |
| | SRDNSKNTLY | FTLTISSLQP | | | | | | |
| | LQMNSLRAED | EDFATYYCQQ | | | | | | |
| | TAVYYCARDR | YKSYPVTFGQ | | | | | | |
| | PYYYYMDVWG | GTKVEIK | | | | | | |
| | KGTTVTVSS | (SEQ ID | | | | | | |
| | (SEQ ID | NO: 1367) | | | | | | |
| | NO: 1395) | | | | | | | |
| PMAB12 | EVQLLESGGG | DIQMTQSPSS | FTFSS | SAISG | CARDR | RASQS | SSLQS | QQYKS |
| | LVQPGGSLRL | LSASVGDRVT | YWMH | SGGST | PYGYY | ISRSL | (SEQ | YPVT |
| | SCAASGFTES | ITCRASQSIS | (SEQ | YYA | MDVW | A | ID | (SEQ |
| | SYWMHWVRQA | RSLAWYQQKP | ID | (SEQ | (SEQ | (SEQ | NO: | ID |
| | PGKGLEWVSA | GKAPKLLIYA | NO: | ID | ID | ID | 1497) | NO: |
| | ISGSGGSTYY | ASSLQSGVPS | 1499) | NO: | NO: | NO: | | 1498) |
| | ADSVKGRFTI | RFSGSGSGTD | | 1505) | 1501) | 1504) | | |
| | SRDNSKNTLY | FTLTISSLQP | | | | | | |
| | LQMNSLRAED | EDFATYYCQQ | | | | | | |
| | TAVYYCARDR | YKSYPVTFGQ | | | | | | |
| | PYGYYMDVWG | GTKVEIK | | | | | | |
| | KGTTVTVSS | (SEQ ID | | | | | | |
| | (SEQ ID | NO: 1363) | | | | | | |
| | NO: 1442) | | | | | | | |
| PMAB13 | EVQLLESGGG | DIQMTQSPSS | FTFSS | SAISG | CARDR | RASQS | SSLQS | QQYKS |
| | LVQPGGSLRL | LSASVGDRVT | YWMH | SGGST | PYYYY | ISRSL | (SEQ | YPVT |
| | SCAASGFTFS | ITCRASQSIS | (SEQ | YYA | MDVW | A | ID | (SEQ |
| | SYWMHWVRQA | RSLAWYQQKP | ID | (SEQ | (SEQ | (SEQ | NO: | ID |
| | PGKGLEWVSA | GKAPKLLIYA | NO: | ID | ID | ID | 1497) | NO: |
| | ISGSGGSTYY | ASSLQSGVPS | 1499) | NO: | NO: | NO: | | 1498) |
| | ADSVKGRFTI | RFSGSGSGTD | | 1505) | 1503) | 1504) | | |
| | SRDNSKNTLY | FTLTISSLQP | | | | | | |
| | LQMNSLRAED | EDFATYYCQQ | | | | | | |
| | TAVYYCARDR | YKSYPVTFGQ | | | | | | |
| | PYYYYMDVWG | GTKVEIK | | | | | | |
| | KGTTVTVSS | (SEQ ID | | | | | | |
| | (SEQ ID | NO: 1363) | | | | | | |
| | NO: 1395) | | | | | | | |
| PMAB14 | EVQLLESGGG | DIQMTQSPSS | FTFSS | SYISG | CARDR | RASQS | SSLQS | QQYKS |
| | LVQPGGSLRL | LSASVGDRVT | YWMH | SGGYT | PYGYY | ISSSL | (SEQ | YPVT |
| | SCAASGFTES | ITCRASQSIS | (SEQ | NYA | MDVW | A | ID | (SEQ |
| | SYWMHWVRQA | SSLAWYQQKP | ID | (SEQ | (SEQ | (SEQ | NO: | ID |
| | PGKGLEWVSY | GKAPKLLIYA | NO: | ID | ID | ID | 1497) | NO: |
| | ISGSGGYTNY | ASSLQSGVPS | 1499) | NO: | NO: | NO: | | 1498) |
| | ADSVKGRFTI | RFSGSGSGTD | | 1506) | 1501) | 1502) | | |
| | SRDNSKNTLY | FTLTISSLQP | | | | | | |
| | LQMNSLRAED | EDFATYYCQQ | | | | | | |
| | TAVYYCARDR | YKSYPVTFGQ | | | | | | |
| | PYGYYMDVWG | GTKVEIK | | | | | | |
| | KGTTVTVSS | (SEQ ID | | | | | | |
| | (SEQ ID | NO: 1367) | | | | | | |
| | NO: 1443) | | | | | | | |
| PMAB15 | EVQLLESGGG | DIQMTQSPSS | FTFSS | SAISG | CARDR | RASQS | SSLQS | QQYKS |
| | LVQPGGSLRL | LSASVGDRVT | YWMH | SGGST | PYYYD | ISSSL | (SEQ | YPVT |
| | SCAASGFTFS | ITCRASQSIS | (SEQ | YYA | MDVW | A | ID | (SEQ |
| | SYWMHWVRQA | SSLAWYQQKP | ID | (SEQ | (SEQ | (SEQ | NO: | ID |
| | PGKGLEWVSA | GKAPKLLIYA | NO: | ID | ID | ID | 1497) | NO: |
| | ISGSGGSTYY | ASSLQSGVPS | 1499) | NO: | NO: | NO: | | 1498) |
| | ADSVKGRFTI | RFSGSGSGTD | | 1505) | 1507) | 1502) | | |
| | SRDNSKNTLY | FTLTISSLQP | | | | | | |
| | LQMNSLRAED | EDFATYYCQQ | | | | | | |
| | TAVYYCARDR | YKSYPVTFGQ | | | | | | |
| | PYYYDMDVWG | GTKVEIK | | | | | | |
| | KGTTVTVSS | (SEQ ID | | | | | | |
| | (SEQ ID | NO: 1367) | | | | | | |
| | NO: 1444) | | | | | | | |
| PMAB16 | EVQLLESGGG | DIQMTQSPSS | FTFSS | SYISG | CARDR | RASQS | SSLQS | QQYKS |
| | LVQPGGSLRL | LSASVGDRVT | YWMH | SGGYT | PYYYD | ISSSL | (SEQ | YPVT |
| | SCAASGFTFS | ITCRASQSIS | (SEQ | NYA | MDVW | A | ID | (SEQ |
| | SYWMHWVRQA | SSLAWYQQKP | ID | (SEQ | (SEQ | (SEQ | NO: | ID |
| | PGKGLEWVSY | GKAPKLLIYA | NO: | ID | ID | ID | 1497) | NO: |
| | ISGSGGYTNY | ASSLQSGVPS | 1499) | NO: | NO: | NO: | | 1498) |
| | ADSVKGRFTI | RFSGSGSGTD | | 1506) | 1507) | 1502) | | |
| | SRDNSKNTLY | FTLTISSLQP | | | | | | |
| | LQMNSLRAED | EDFATYYCQQ | | | | | | |
| | TAVYYCARDR | YKSYPVTFGQ | | | | | | |
| | PYYYDMDVWG | GTKVEIK | | | | | | |
| | KGTTVTVSS | (SEQ ID | | | | | | |
| | (SEQ ID | NO: 1367) | | | | | | |
| | NO: 1445) | | | | | | | |
| PMAB19 | EVQLLESGGG | DIQMTQSPSS | FTFSS | SYISG | CARDR | RASQS | SSLQS | QQYKS |
| | LVQPGGSLRL | LSASVGDRVT | FWMH | DSGYT | PYYYY | VSRSL | (SEQ | YPVT |
| | SCAASGFTFS | ITCRASQSVS | (SEQ | NYA | MDVW | A | ID | (SEQ |
| | SFWMHWVRQA | RSLAWYQQKP | ID | (SEQ | (SEQ | (SEQ | NO: | ID |
| | PGKGLEWISY | GKAPKLLIYA | NO: | ID | ID | ID | 1497) | NO: |
| | ISGDSGYTNY | ASSLQSGVPS | 1508) | NO: | NO: | NO: | | 1498) |
| | ADSVKGRFTI | RFSGSGSGTD | | 1494) | 1503) | 1496) | | |
| | SRDNSKNTLY | FTLTISSLQP | | | | | | |
| | LQMNSLRAED | EDFATYYCQQ | | | | | | |
| | TAVYYCARDR | YKSYPVTFGQ | | | | | | |
| | PYYYYMDVWG | GTKVEIK | | | | | | |
| | KGTTVTVSS | (SEQ ID | | | | | | |
| | (SEQ ID | NO: 592) | | | | | | |
| | NO: 1353) | | | | | | | |
| PMAB20 | EVQLLESGGG | DIQMTQSPSS | FTFSD | SYISG | CARDR | RASQS | SSLQS | QQYKS |
| | LVQPGGSLRL | LSASVGDRVT | YWMH | DSGYT | PYYYY | VSRSL | (SEQ | YPVT |
| | SCAASGFTFS | ITCRASQSVS | (SEQ | NYA | MDVW | A | ID | (SEQ |
| | DYWMHWVRQA | RSLAWYQQKP | ID | (SEQ | (SEQ | (SEQ | NO: | ID |
| | PGKGLEWISY | GKAPKLLIYA | NO: | ID | ID | ID | 1497) | NO: |
| | ISGDSGYTNY | ASSLQSGVPS | 1509) | NO: | NO: | NO: | | 1498) |
| | ADSVKGRFTI | RFSGSGSGTD | | 1494) | 1503) | 1496) | | |
| | SRDNSKNTLY | FTLTISSLQP | | | | | | |
| | LQMNSLRAED | EDFATYYCQQ | | | | | | |
| | TAVYYCARDR | YKSYPVTFGQ | | | | | | |
| | PYYYYMDVWG | GTKVEIK | | | | | | |
| | KGTTVTVSS | (SEQ ID | | | | | | |
| | (SEQ ID | NO: 592) | | | | | | |
| | NO: 1391) | | | | | | | |
| PMAB21 | EVQLLESGGG | DIQMTQSPSS | FTFSD | SYISG | CARDR | RASQS | SSLQS | QQYKS |
| | LVQPGGSLRL | LSASVGDRVT | FAMH | DSGYT | PYYYY | VSRSL | (SEQ | YPVT |
| | SCAASGFTFS | ITCRASQSVS | (SEQ | NYA | MDVW | A | ID | (SEQ |
| | DFAMHWVRQA | RSLAWYQQKP | ID | (SEQ | (SEQ | (SEQ | NO: | ID |
| | PGKGLEWISY | GKAPKLLIYA | NO: | ID | ID | ID | 1497) | NO: |
| | ISGDSGYTNY | ASSLQSGVPS | 1510) | NO: | NO: | NO: | | 1498) |
| | ADSVKGRFTI | RFSGSGSGTD | | 1494) | 1503) | 1496) | | |
| | SRDNSKNTLY | FTLTISSLQP | | | | | | |
| | LQMNSLRAED | EDFATYYCQQ | | | | | | |
| | TAVYYCARDR | YKSYPVTFGQ | | | | | | |
| | PYYYYMDVWG | GTKVEIK | | | | | | |
| | KGTTVTVSS | (SEQ ID | | | | | | |
| | (SEQ ID | NO: 592) | | | | | | |
| | NO: 1450) | | | | | | | |
| PMAB22 | EVQLLESGGG | DIQMTQSPSS | FTFSD | SYISG | CARDR | RASQS | SSLQS | QQYKS |
| | LVQPGGSLRL | LSASVGDRVT | FWMS | DSGYT | PYYYY | VSRSL | (SEQ | YPVT |
| | SCAASGFTFS | ITCRASQSVS | (SEQ | NYA | MDVW | A | ID | (SEQ |
| | DFWMSWVRQA | RSLAWYQQKP | ID | (SEQ | (SEQ | (SEQ | NO: | ID |
| | PGKGLEWISY | GKAPKLLIYA | NO: | ID | ID | ID | 1497) | NO: |
| | ISGDSGYTNY | ASSLQSGVPS | 1511) | NO: | NO: | NO: | | 1498) |
| | ADSVKGRFTI | RFSGSGSGTD | | 1494) | 1503) | 1496) | | |
| | SRDNSKNTLY | FTLTISSLQP | | | | | | |
| | LQMNSLRAED | EDFATYYCQQ | | | | | | |
| | TAVYYCARDR | YKSYPVTFGQ | | | | | | |
| | PYYYYMDVWG | GTKVEIK | | | | | | |
| | KGTTVTVSS | (SEQ ID | | | | | | |
| | (SEQ ID | NO: 592) | | | | | | |
| | NO: 1451) | | | | | | | |
| PMAB23 | EVQLLESGGG | DIQMTQSPSS | FTFSD | SYISG | CARDR | RASQS | SSLQS | QQYKS |
| | LVQPGGSLRL | LSASVGDRVT | FWMH | DSGYT | PYYYY | VSRSL | (SEQ | YPVT |
| | SCAASGFTFS | ITCRASQSVS | (SEQ | NYA | MDVW | A | ID | (SEQ |
| | DFWMHWVRQA | RSLAWYQQKP | ID | (SEQ | (SEQ | (SEQ | NO: | ID |
| | PGKGLEWVSY | GKAPKLLIYA | NO: | ID | ID | ID | 1497) | NO: |
| | ISGDSGYTNY | ASSLQSGVPS | 1493) | NO: | NO: | NO: | | 1498) |
| | ADSVKGRFTI | RFSGSGSGTD | | 1494) | 1503) | 1496) | | |
| | SRDNSKNTLY | FTLTISSLQP | | | | | | |
| | LQMNSLRAED | EDFATYYCQQ | | | | | | |
| | TAVYYCARDR | YKSYPVTFGQ | | | | | | |
| | PYYYYMDVWG | GTKVEIK | | | | | | |
| | KGTTVTVSS | (SEQ ID | | | | | | |
| | (SEQ ID | NO: 592) | | | | | | |
| | NO: 1452) | | | | | | | |
| PMAB24 | EVQLLESGGG | DIQMTQSPSS | FTFSD | SAISG | CARDR | RASQS | SSLQS | QQYKS |
| | LVQPGGSLRL | LSASVGDRVT | FWMH | DSGYT | PYYYY | VSRSL | (SEQ | YPVT |
| | SCAASGFTES | ITCRASQSVS | (SEQ | NYA | MDVW | A | ID | (SEQ |
| | DFWMHWVRQA | RSLAWYQQKP | ID | (SEQ | (SEQ | (SEQ | NO: | ID |
| | PGKGLEWISA | GKAPKLLIYA | NO: | ID | ID | ID | 1497) | NO: |
| | ISGDSGYTNY | ASSLQSGVPS | 1493) | NO: | NO: | NO: | | 1498) |
| | ADSVKGRFTI | RFSGSGSGTD | | 1512) | 1503) | 1496) | | |
| | SRDNSKNTLY | FTLTISSLQP | | | | | | |
| | LQMNSLRAED | EDFATYYCQQ | | | | | | |
| | TAVYYCARDR | YKSYPVTFGQ | | | | | | |
| | PYYYYMDVWG | GTKVEIK | | | | | | |
| | KGTTVTVSS | (SEQ ID | | | | | | |
| | (SEQ ID | NO: 592) | | | | | | |
| | NO: 1453) | | | | | | | |
| PMAB25 | EVQLLESGGG | DIQMTQSPSS | FTFSD | SYISG | CARDR | RASQS | SSLQS | QQYKS |
| | LVQPGGSLRL | LSASVGDRVT | FWMH | SSGYT | PYYYY | VSRSL | (SEQ | YPVT |
| | SCAASGFTFS | ITCRASQSVS | (SEQ | NYA | MDVW | A | ID | (SEQ |
| | DFWMHWVRQA | RSLAWYQQKP | ID | (SEQ | (SEQ | (SEQ | NO: | ID |
| | PGKGLEWISY | GKAPKLLIYA | NO: | ID | ID | ID | 1497) | NO: |
| | ISGSSGYTNY | ASSLQSGVPS | 1493) | NO: | NO: | NO: | | 1498) |
| | ADSVKGRFTI | RFSGSGSGTD | | 1513) | 1503) | 1496) | | |
| | SRDNSKNTLY | FTLTISSLQP | | | | | | |
| | LQMNSLRAED | EDFATYYCQQ | | | | | | |
| | TAVYYCARDR | YKSYPVTFGQ | | | | | | |
| | PYYYYMDVWG | GTKVEIK | | | | | | |
| | KGTTVTVSS | (SEQ ID | | | | | | |
| | (SEQ ID | NO: 592) | | | | | | |
| | NO: 1454) | | | | | | | |
| PMAB26 | EVQLLESGGG | DIQMTQSPSS | FTFSD | SYISG | CARDR | RASQS | SSLQS | QQYKS |
| | LVQPGGSLRL | LSASVGDRVT | FWMH | DGGYT | PYYYY | VSRSL | (SEQ | YPVT |
| | SCAASGFTES | ITCRASQSVS | (SEQ | NYA | MDVW | A | ID | (SEQ |
| | DFWMHWVRQA | RSLAWYQQKP | ID | (SEQ | (SEQ | (SEQ | NO: | ID |
| | PGKGLEWISY | GKAPKLLIYA | NO: | ID | ID | ID | 1497) | NO: |
| | ISGDGGYTNY | ASSLQSGVPS | 1493) | NO: | NO: | NO: | | 1498) |
| | ADSVKGRFTI | RFSGSGSGTD | | 1514) | 1503) | 1496) | | |
| | SRDNSKNTLY | FTLTISSLQP | | | | | | |
| | LQMNSLRAED | EDFATYYCQQ | | | | | | |
| | TAVYYCARDR | YKSYPVTFGQ | | | | | | |
| | PYYYYMDVWG | GTKVEIK | | | | | | |
| | KGTTVTVSS | (SEQ ID | | | | | | |
| | (SEQ ID | NO: 592) | | | | | | |
| | NO: 1455) | | | | | | | |
| PMAB27 | EVQLLESGGG | DIQMTQSPSS | FTFSD | SYISG | CARDR | RASQS | SSLQS | QQYKS |
| | LVQPGGSLRL | LSASVGDRVT | FWMH | DSGST | PYYYY | VSRSL | (SEQ | YPVT |
| | SCAASGFTFS | ITCRASQSVS | (SEQ | NYA | MDVW | A | ID | (SEQ |
| | DFWMHWVRQA | RSLAWYQQKP | ID | (SEQ | (SEQ | (SEQ | NO: | ID |
| | PGKGLEWISY | GKAPKLLIYA | NO: | ID | ID | ID | 1497) | NO: |
| | ISGDSGSTNY | ASSLQSGVPS | 1493) | NO: | NO: | NO: | | 1498) |
| | ADSVKGRFTI | RFSGSGSGTD | | 1515) | 1503) | 1496) | | |
| | SRDNSKNTLY | FTLTISSLQP | | | | | | |
| | LQMNSLRAED | EDFATYYCQQ | | | | | | |
| | TAVYYCARDR | YKSYPVTFGQ | | | | | | |
| | PYYYYMDVWG | GTKVEIK | | | | | | |
| | KGTTVTVSS | (SEQ ID | | | | | | |
| | (SEQ ID | NO: 592) | | | | | | |
| | NO: 1456) | | | | | | | |
| PMAB28 | EVQLLESGGG | DIQMTQSPSS | FTFSD | SYISG | CARDR | RASQS | SSLQS | QQYKS |
| | LVQPGGSLRL | LSASVGDRVT | FWMH | DSGYT | PYYYY | VSRSL | (SEQ | YPVT |
| | SCAASGFTES | ITCRASQSVS | (SEQ | YYA | MDVW | A | ID | (SEQ |
| | DFWMHWVRQA | RSLAWYQQKP | ID | (SEQ | (SEQ | (SEQ | NO: | ID |
| | PGKGLEWISY | GKAPKLLIYA | NO: | ID | ID | ID | 1497) | NO: |
| | ISGDSGYTYY | ASSLQSGVPS | 1493) | NO: | NO: | NO: | | 1498) |
| | ADSVKGRFTI | RFSGSGSGTD | | 1516) | 1503) | 1496) | | |
| | SRDNSKNTLY | FTLTISSLQP | | | | | | |
| | LQMNSLRAED | EDFATYYCQQ | | | | | | |
| | TAVYYCARDR | YKSYPVTFGQ | | | | | | |
| | PYYYYMDVWG | GTKVEIK | | | | | | |
| | KGTTVTVSS | (SEQ ID | | | | | | |
| | (SEQ ID | NO: 592) | | | | | | |
| | NO: 1457) | | | | | | | |
| PMAB29 | EVQLLESGGG | DIQMTQSPSS | FTFSD | SYISG | CARDR | RASQS | SSLQS | QQYKS |
| | LVQPGGSLRL | LSASVGDRVT | FWMH | DSGYT | PYYYY | VSRSL | (SEQ | YPVT |
| | SCAASGFTFS | ITCRASQSVS | (SEQ | NYA | MDVW | A | ID | (SEQ |
| | DFWMHWVRQA | RSLAWYQQKP | ID | (SEQ | (SEQ | (SEQ | NO: | ID |
| | PGKGLEWISY | GKAPKLLIYA | NO: | ID | ID | ID | 1497) | NO: |
| | ISGDSGYTNY | ASSLQSGVPS | 1493) | NO: | NO: | NO: | | 1498) |
| | AASVKGRFTI | RFSGSGSGTD | | 1494) | 1503) | 1496) | | |
| | SRDNSKNTLY | FTLTISSLQP | | | | | | |
| | LQMNSLRAED | EDFATYYCQQ | | | | | | |
| | TAVYYCARDR | YKSYPVTFGQ | | | | | | |
| | PYYYYMDVWG | GTKVEIK | | | | | | |
| | KGTTVTVSS | (SEQ ID | | | | | | |
| | (SEQ ID | NO: 592) | | | | | | |
| | NO: 1458) | | | | | | | |
| PMAB30 | EVQLLESGGG | DIQMTQSPSS | FTFSD | SYISG | CARDR | RASQS | SSLQS | QQYKS |
| | LVQPGGSLRL | LSASVGDRVT | FWMH | DSGYT | PYYYY | VSRSL | (SEQ | YPVT |
| | SCAASGFTES | ITCRASQSVS | (SEQ | NYA | MDVW | A | ID | (SEQ |
| | DFWMHWVRQA | RSLAWYQQKP | ID | (SEQ | (SEQ | (SEQ | NO: | ID |
| | PGKGLEWISY | GKAPKLLIYA | NO: | ID | ID | ID | 1497) | NO: |
| | ISGDSGYTNY | ASSLQSGVPS | 1493) | NO: | NO: | NO: | | 1498) |
| | AQSVKGRFTI | RFSGSGSGTD | | 1494) | 1503) | 1496) | | |
| | SRDNSKNTLY | FTLTISSLQP | | | | | | |
| | LQMNSLRAED | EDFATYYCQQ | | | | | | |
| | TAVYYCARDR | YKSYPVTFGQ | | | | | | |
| | PYYYYMDVWG | GTKVEIK | | | | | | |
| | KGTTVTVSS | (SEQ ID | | | | | | |
| | (SEQ ID | NO: 592) | | | | | | |
| | NO: 1459) | | | | | | | |
| PMAB31 | EVQLLESGGG | DIQMTQSPSS | FTFSD | SYISG | CARDR | RASQS | SSLQS | QQYKS |
| | LVQPGGSLRL | LSASVGDRVT | FWMH | DSGYT | PYYYY | VSRSL | (SEQ | YPVT |
| | SCAASGFTFS | ITCRASQSVS | (SEQ | NYA | MDVW | A | ID | (SEQ |
| | DFWMHWVRQA | RSLAWYQQKP | ID | (SEQ | (SEQ | (SEQ | NO: | ID |
| | PGKGLEWISY | GKAPKLLIYA | NO: | ID | ID | ID | 1497) | NO: |
| | ISGDSGYTNY | ASSLQSGVPS | 1493) | NO: | NO: | NO: | | 1498) |
| | ADSVKGRFTI | RFSGSGSGTD | | 1494) | 1503) | 1496) | | |
| | SRDASKNTLY | FTLTISSLQP | | | | | | |
| | LQMNSLRAED | EDFATYYCQQ | | | | | | |
| | TAVYYCARDR | YKSYPVTFGQ | | | | | | |
| | PYYYYMDVWG | GTKVEIK | | | | | | |
| | KGTTVTVSS | (SEQ ID | | | | | | |
| | (SEQ ID | NO: 592) | | | | | | |
| | NO: 1460) | | | | | | | |
| PMAB32 | EVQLLESGGG | DIQMTQSPSS | FTFSD | SYISG | CARDR | RASQS | SSLQS | QQYKS |
| | LVQPGGSLRL | LSASVGDRVT | FWMH | DSGYT | PYYYY | VSRSL | (SEQ | YPVT |
| | SCAASGFTFS | ITCRASQSVS | (SEQ | NYA | MDVW | A | ID | (SEQ |
| | DFWMHWVRQA | RSLAWYQQKP | ID | (SEQ | (SEQ | (SEQ | NO: | ID |
| | PGKGLEWISY | GKAPKLLIYA | NO: | ID | ID | ID | 1497) | NO: |
| | ISGDSGYTNY | ASSLQSGVPS | 1493) | NO: | NO: | NO: | | 1498) |
| | ADSVKGRFTI | RFSGSGSGTD | | 1494) | 1503) | 1496) | | |
| | SRDQSKNTLY | FTLTISSLQP | | | | | | |
| | LQMNSLRAED | EDFATYYCQQ | | | | | | |
| | TAVYYCARDR | YKSYPVTFGQ | | | | | | |
| | PYYYYMDVWG | GTKVEIK | | | | | | |
| | KGTTVTVSS | (SEQ ID | | | | | | |
| | (SEQ ID | NO: 592) | | | | | | |
| | NO: 1379) | | | | | | | |
| PMAB33 | EVQLLESGGG | DIQMTQSPSS | FTFSD | SYISG | CARDR | RASQS | SSLQS | QQYKS |
| | LVQPGGSLRL | LSASVGDRVT | FWMH | DSGYT | PYYYY | VSRSL | (SEQ | YPVT |
| | SCAASGFTFS | ITCRASQSVS | (SEQ | NYA | MDVW | A | ID | (SEQ |
| | DFWMHWVRQA | RSLAWYQQKP | ID | (SEQ | (SEQ | (SEQ | NO: | ID |
| | PGKGLEWISY | GKAPKLLIYA | NO: | ID | ID | ID | 1497) | NO: |
| | ISGDSGYTNY | ASSLQSGVPS | 1493) | NO: | NO: | NO: | | 1498) |
| | ADSVKGRFTI | RFSGSGSGTD | | 1494) | 1503) | 1496) | | |
| | SRDNSKNTLY | FTLTISSLQP | | | | | | |
| | LQMASLRAED | EDFATYYCQQ | | | | | | |
| | TAVYYCARDR | YKSYPVTFGQ | | | | | | |
| | PYYYYMDVWG | GTKVEIK | | | | | | |
| | KGTTVTVSS | (SEQ ID | | | | | | |
| | (SEQ ID | NO: 592) | | | | | | |
| | NO: 1461) | | | | | | | |
| PMAB34 | EVQLLESGGG | DIQMTQSPSS | FTFSD | SYISG | CARDR | RASQS | SSLQS | QQYKS |
| | LVQPGGSLRL | LSASVGDRVT | FWMH | DSGYT | PYYYY | VSRSL | (SEQ | YPVT |
| | SCAASGFTFS | ITCRASQSVS | (SEQ | NYA | MDVW | A | ID | (SEQ |
| | DFWMHWVRQA | RSLAWYQQKP | ID | (SEQ | (SEQ | (SEQ | NO: | ID |
| | PGKGLEWISY | GKAPKLLIYA | NO: | ID | ID | ID | 1497) | NO: |
| | ISGDSGYTNY | ASSLQSGVPS | 1493) | NO: | NO: | NO: | | 1498) |
| | ADSVKGRFTI | RFSGSGSGTD | | 1494) | 1503) | 1496) | | |
| | SRDNSKNTLY | FTLTISSLQP | | | | | | |
| | LQMGSLRAED | EDFATYYCQQ | | | | | | |
| | TAVYYCARDR | YKSYPVTFGQ | | | | | | |
| | PYYYYMDVWG | GTKVEIK | | | | | | |
| | KGTTVTVSS | (SEQ ID | | | | | | |
| | (SEQ ID | NO: 592) | | | | | | |
| | NO: 1462) | | | | | | | |
| PMAB35 | EVQLLESGGG | DIQMTQSPSS | FTFSD | SYISG | CARDR | RASQS | SSLQS | QQYKS |
| | LVQPGGSLRL | LSASVGDRVT | FWMH | DSGYT | PYYYY | VSRSL | (SEQ | YPVT |
| | SCAASGFTES | ITCRASQSVS | (SEQ | NYA | MDVW | A | ID | (SEQ |
| | DFWMHWVRQA | RSLAWYQQKP | ID | (SEQ | (SEQ | (SEQ | NO: | ID |
| | PGKGLEWISY | GKAPKLLIYA | NO: | ID | ID | ID | 1497) | NO: |
| | ISGDSGYTNY | ASSLQSGVPS | 1493) | NO: | NO: | NO: | | 1498) |
| | ADSVKGRFTI | RFSGSGSGTD | | 1494) | 1503) | 1496) | | |
| | SRDNSKNTLY | FTLTISSLQP | | | | | | |
| | LQMQSLRAED | EDFATYYCQQ | | | | | | |
| | TAVYYCARDR | YKSYPVTFGQ | | | | | | |
| | PYYYYMDVWG | GTKVEIK | | | | | | |
| | KGTTVTVSS | (SEQ ID | | | | | | |
| | (SEQ ID | NO: 592) | | | | | | |
| | NO: 1463) | | | | | | | |
| PMAB36 | EVQLLESGGG | DIQMTQSPSS | FTFSD | SYISG | CARDR | RASQS | SSLQS | QQYKS |
| | LVQPGGSLRL | LSASVGDRVT | FWMH | DSGYT | PYYYY | ISRSL | (SEQ | YPVT |
| | SCAASGFTFS | ITCRASQSIS | (SEQ | NYA | MDVW | A | ID | (SEQ |
| | DFWMHWVRQA | RSLAWYQQKP | ID | (SEQ | (SEQ | (SEQ | NO: | ID |
| | PGKGLEWISY | GKAPKLLIYA | NO: | ID | ID | ID | 1497) | NO: |
| | ISGDSGYTNY | ASSLQSGVPS | 1493) | NO: | NO: | NO: | | 1498) |
| | ADSVKGRFTI | RFSGSGSGTD | | 1494) | 1503) | 1504) | | |
| | SRDNSKNTLY | FTLTISSLQP | | | | | | |
| | LQMNSLRAED | EDFATYYCQQ | | | | | | |
| | TAVYYCARDR | YKSYPVTFGQ | | | | | | |
| | PYYYYMDVWG | GTKVEIK | | | | | | |
| | KGTTVTVSS | (SEQ ID | | | | | | |
| | (SEQ ID | NO: 1363) | | | | | | |
| | NO: 591) | | | | | | | |
| PMAB37 | EVQLLESGGG | DIQMTQSPSS | FTFSD | SYISG | CARDR | RASQS | SSLQS | QQYKS |
| | LVQPGGSLRL | LSASVGDRVT | FWMH | DSGYT | PYYYY | VSSSL | (SEQ | YPVT |
| | SCAASGFTES | ITCRASQSVS | (SEQ | NYA | MDVW | A | ID | (SEQ |
| | DFWMHWVRQA | SSLAWYQQKP | ID | (SEQ | (SEQ | (SEQ | NO: | ID |
| | PGKGLEWISY | GKAPKLLIYA | NO: | ID | ID | ID | 1497) | NO: |
| | ISGDSGYTNY | ASSLQSGVPS | 1493) | NO: | NO: | NO: | | 1498) |
| | ADSVKGRFTI | RFSGSGSGTD | | 1494) | 1503) | 1517) | | |
| | SRDNSKNTLY | FTLTISSLQP | | | | | | |
| | LQMNSLRAED | EDFATYYCQQ | | | | | | |
| | TAVYYCARDR | YKSYPVTFGQ | | | | | | |
| | PYYYYMDVWG | GTKVEIK | | | | | | |
| | KGTTVTVSS | (SEQ ID | | | | | | |
| | (SEQ ID | NO: 1364) | | | | | | |
| | NO: 591) | | | | | | | |
| PMAB38 | EVQLLESGGG | DIQMTQSPSS | FTFSD | SYISG | CARDR | RASQS | SSLQS | QQYKS |
| | LVQPGGSLRL | LSASVGDRVT | FWMH | DSGYT | PYYYY | VSRYL | (SEQ | YPVT |
| | SCAASGFTFS | ITCRASQSVS | (SEQ | NYA | MDVW | A | ID | (SEQ |
| | DFWMHWVRQA | RYLAWYQQKP | ID | (SEQ | (SEQ | (SEQ | NO: | ID |
| | PGKGLEWISY | GKAPKLLIYA | NO: | ID | ID | ID | 1497) | NO: |
| | ISGDSGYTNY | ASSLQSGVPS | 1493) | NO: | NO: | NO: | | 1498) |
| | ADSVKGRFTI | RFSGSGSGTD | | 1494) | 1503) | 1518) | | |
| | SRDNSKNTLY | FTLTISSLQP | | | | | | |
| | LQMNSLRAED | EDFATYYCQQ | | | | | | |
| | TAVYYCARDR | YKSYPVTFGQ | | | | | | |
| | PYYYYMDVWG | GTKVEIK | | | | | | |
| | KGTTVTVSS | (SEQ ID | | | | | | |
| | (SEQ ID | NO: 1365) | | | | | | |
| | NO: 591) | | | | | | | |
| PMAB39 | EVQLLESGGG | DIQMTQSPSS | FTFSD | SYISG | CARDR | RASQS | SSLQS | QQYKS |
| | LVQPGGSLRL | LSASVGDRVT | FWMH | DSGYT | PYYYY | VSRSL | (SEQ | YPVT |
| | SCAASGFTES | ITCRASQSVS | (SEQ | NYA | MDVW | N | ID | (SEQ |
| | DFWMHWVRQA | RSLNWYQQKP | ID | (SEQ | (SEQ | (SEQ | NO: | ID |
| | PGKGLEWISY | GKAPKLLIYA | NO: | ID | ID | ID | 1497) | NO: |
| | ISGDSGYTNY | ASSLQSGVPS | 1493) | NO: | NO: | NO: | | 1498) |
| | ADSVKGRFTI | RFSGSGSGTD | | 1494) | 1503) | 1519) | | |
| | SRDNSKNTLY | FTLTISSLQP | | | | | | |
| | LQMNSLRAED | EDFATYYCQQ | | | | | | |
| | TAVYYCARDR | YKSYPVTFGQ | | | | | | |
| | PYYYYMDVWG | GTKVEIK | | | | | | |
| | KGTTVTVSS | (SEQ ID | | | | | | |
| | (SEQ ID | NO: 1366) | | | | | | |
| | NO: 591) | | | | | | | |
| PMAB40 | EVQLLESGGG | DIQMTQSPSS | FTFSD | SYISG | CARDR | RASQS | SSLQS | QQSKS |
| | LVQPGGSLRL | LSASVGDRVT | FWMH | DSGYT | PYYYY | VSRSL | (SEQ | YPVT |
| | SCAASGFTES | ITCRASQSVS | (SEQ | NYA | MDVW | A | ID | (SEQ |
| | DFWMHWVRQA | RSLAWYQQKP | ID | (SEQ | (SEQ | (SEQ | NO: | ID |
| | PGKGLEWISY | GKAPKLLIYA | NO: | ID | ID | ID | 1497) | NO: |
| | ISGDSGYTNY | ASSLQSGVPS | 1493) | NO: | NO: | NO: | | 1520) |
| | ADSVKGRFTI | RFSGSGSGTD | | 1494) | 1503) | 1496) | | |
| | SRDNSKNTLY | FTLTISSLQP | | | | | | |
| | LQMNSLRAED | EDFATYYCQQ | | | | | | |
| | TAVYYCARDR | SKSYPVTFGQ | | | | | | |
| | PYYYYMDVWG | GTKVEIK | | | | | | |
| | KGTTVTVSS | (SEQ ID | | | | | | |
| | (SEQ ID | NO: 1464) | | | | | | |
| | NO: 591) | | | | | | | |
| PMAB41 | EVQLLESGGG | DIQMTQSPSS | FTFSD | SYISG | CARDR | RASQS | SSLQS | QQYYS |
| | LVQPGGSLRL | LSASVGDRVT | FWMH | DSGYT | PYYYY | VSRSL | (SEQ | YPVT |
| | SCAASGFTFS | ITCRASQSVS | (SEQ | NYA | MDVW | A | ID | (SEQ |
| | DFWMHWVRQA | RSLAWYQQKP | ID | (SEQ | (SEQ | (SEQ | NO: | ID |
| | PGKGLEWISY | GKAPKLLIYA | NO: | ID | ID | ID | 1497) | NO: |
| | ISGDSGYTNY | ASSLQSGVPS | 1493) | NO: | NO: | NO: | | 1521) |
| | ADSVKGRFTI | RFSGSGSGTD | | 1494) | 1503) | 1496) | | |
| | SRDNSKNTLY | FTLTISSLQP | | | | | | |
| | LQMNSLRAED | EDFATYYCQQ | | | | | | |
| | TAVYYCARDR | YYSYPVTFGQ | | | | | | |
| | PYYYYMDVWG | GTKVEIK | | | | | | |
| | KGTTVTVSS | (SEQ ID | | | | | | |
| | (SEQ ID | NO: 1465) | | | | | | |
| | NO: 591) | | | | | | | |
| PMAB42 | EVQLLESGGG | DIQMTQSPSS | FTFSD | SYISG | CARDR | RASQS | SSLQS | QQYKS |
| | LVQPGGSLRL | LSASVGDRVT | FWMH | DSGYT | PYYYY | VSRSL | (SEQ | TPVT |
| | SCAASGFTFS | ITCRASQSVS | (SEQ | NYA | MDVW | A | ID | (SEQ |
| | DFWMHWVRQA | RSLAWYQQKP | ID | (SEQ | (SEQ | (SEQ | NO: | ID |
| | PGKGLEWISY | GKAPKLLIYA | NO: | ID | ID | ID | 1497) | NO: |
| | ISGDSGYTNY | ASSLQSGVPS | 1493) | NO: | NO: | NO: | | 1522) |
| | ADSVKGRFTI | RFSGSGSGTD | | 1494) | 1503) | 1496) | | |
| | SRDNSKNTLY | FTLTISSLQP | | | | | | |
| | LQMNSLRAED | EDFATYYCQQ | | | | | | |
| | TAVYYCARDR | YKSTPVTFGQ | | | | | | |
| | PYYYYMDVWG | GTKVEIK | | | | | | |
| | KGTTVTVSS | (SEQ ID | | | | | | |
| | (SEQ ID | NO: 1466) | | | | | | |
| | NO: 591) | | | | | | | |
| PMAB43 | EVQLLESGGG | DIQMTQSPSS | FTFSD | SYISG | CARDR | RASQS | SSLQS | QQYKS |
| | LVQPGGSLRL | LSASVGDRVT | FWMH | DSGYT | PYYYY | VSRSL | (SEQ | YPRT |
| | SCAASGFTES | ITCRASQSVS | (SEQ | NYA | MDVW | A | ID | (SEQ |
| | DFWMHWVRQA | RSLAWYQQKP | ID | (SEQ | (SEQ | (SEQ | NO: | ID |
| | PGKGLEWISY | GKAPKLLIYA | NO: | ID | ID | ID | 1497) | NO: |
| | ISGDSGYTNY | ASSLQSGVPS | 1493) | NO: | NO: | NO: | | 1523) |
| | ADSVKGRFTI | RFSGSGSGTD | | 1494) | 1503) | 1496) | | |
| | SRDNSKNTLY | FTLTISSLQP | | | | | | |
| | LQMNSLRAED | EDFATYYCQQ | | | | | | |
| | TAVYYCARDR | YKSYPRTFGQ | | | | | | |
| | PYYYYMDVWG | GTKVEIK | | | | | | |
| | KGTTVTVSS | (SEQ ID | | | | | | |
| | (SEQ ID | NO: 1467) | | | | | | |
| | NO: 591) | | | | | | | |
| PMAB44 | EVQLLESGGG | DIQMTQSPSS | FTFSD | SYISG | CARDR | RASQS | SSLQS | QQYKS |
| | LVQPGGSLRL | LSASVGDRVT | FWMH | DSGYT | PTYYY | VSRSL | (SEQ | YPVT |
| | SCAASGFTFS | ITCRASQSVS | (SEQ | NYA | MDVW | A | ID | (SEQ |
| | DFWMHWVRQA | RSLAWYQQKP | ID | (SEQ | (SEQ | (SEQ | NO: | ID |
| | PGKGLEWISY | GKAPKLLIYA | NO: | ID | ID | ID | 1497) | NO: |
| | ISGDSGYTNY | ASSLQSGVPS | 1493) | NO: | NO: | NO: | | 1498) |
| | ADSVKGRFTI | RFSGSGSGTD | | 1494) | 1524) | 1496) | | |
| | SRDNSKNTLY | FTLTISSLQP | | | | | | |
| | LQMNSLRAED | EDFATYYCQQ | | | | | | |
| | TAVYYCARDR | YKSYPVTFGQ | | | | | | |
| | PTYYYMDVWG | GTKVEIK | | | | | | |
| | KGTTVTVSS | (SEQ ID | | | | | | |
| | (SEQ ID | NO: 592) | | | | | | |
| | NO: 1390) | | | | | | | |
| PMAB45 | EVQLLESGGG | DIQMTQSPSS | FTFSD | SYISG | CARDR | RASQS | SSLQS | QQYKS |
| | LVQPGGSLRL | LSASVGDRVT | FWMH | DSGYT | PYDYY | VSRSL | (SEQ | YPVT |
| | SCAASGFTFS | ITCRASQSVS | (SEQ | NYA | MDVW | A | ID | (SEQ |
| | DFWMHWVRQA | RSLAWYQQKP | ID | (SEQ | (SEQ | (SEQ | NO: | ID |
| | PGKGLEWISY | GKAPKLLIYA | NO: | ID | ID | ID | 1497) | NO: |
| | ISGDSGYTNY | ASSLQSGVPS | 1493) | NO: | NO: | NO: | | 1498) |
| | ADSVKGRFTI | RFSGSGSGTD | | 1494) | 1525) | 1496) | | |
| | SRDNSKNTLY | FTLTISSLQP | | | | | | |
| | LQMNSLRAED | EDFATYYCQQ | | | | | | |
| | TAVYYCARDR | YKSYPVTFGQ | | | | | | |
| | PYDYYMDVWG | GTKVEIK | | | | | | |
| | KGTTVTVSS | (SEQ ID | | | | | | |
| | (SEQ ID | NO: 592) | | | | | | |
| | NO: 1468) | | | | | | | |
| PMAB46 | EVQLLESGGG | DIQMTQSPSS | FTFSD | SYISG | CARDR | RASQS | SSLQS | QQYKS |
| | LVQPGGSLRL | LSASVGDRVT | FWMH | DSGYT | PYGYY | VSRSL | (SEQ | YPVT |
| | SCAASGFTFS | ITCRASQSVS | (SEQ | NYA | MDVW | A | ID | (SEQ |
| | DFWMHWVRQA | RSLAWYQQKP | ID | (SEQ | (SEQ | (SEQ | NO: | ID |
| | PGKGLEWISY | GKAPKLLIYA | NO: | ID | ID | ID | 1497) | NO: |
| | ISGDSGYTNY | ASSLQSGVPS | 1493) | NO: | NO: | NO: | | 1498) |
| | ADSVKGRFTI | RFSGSGSGTD | | 1494) | 1501) | 1496) | | |
| | SRDNSKNTLY | FTLTISSLQP | | | | | | |
| | LQMNSLRAED | EDFATYYCQQ | | | | | | |
| | TAVYYCARDR | YKSYPVTFGQ | | | | | | |
| | PYGYYMDVWG | GTKVEIK | | | | | | |
| | KGTTVTVSS | (SEQ ID | | | | | | |
| | (SEQ ID | NO: 592) | | | | | | |
| | NO: 1469) | | | | | | | |
| PMAB47 | EVQLLESGGG | DIQMTQSPSS | FTFSD | SYISG | CARDR | RASQS | SSLQS | QQYKS |
| | LVQPGGSLRL | LSASVGDRVT | FWMH | DSGYT | PYNYY | VSRSL | (SEQ | YPVT |
| | SCAASGFTFS | ITCRASQSVS | (SEQ | NYA | MDVW | A | ID | (SEQ |
| | DFWMHWVRQA | RSLAWYQQKP | ID | (SEQ | (SEQ | (SEQ | NO: | ID |
| | PGKGLEWISY | GKAPKLLIYA | NO: | ID | ID | ID | 1497) | NO: |
| | ISGDSGYTNY | ASSLQSGVPS | 1493) | NO: | NO: | NO: | | 1498) |
| | ADSVKGRFTI | RFSGSGSGTD | | 1494) | 1526) | 1496) | | |
| | SRDNSKNTLY | FTLTISSLQP | | | | | | |
| | LQMNSLRAED | EDFATYYCQQ | | | | | | |
| | TAVYYCARDR | YKSYPVTFGQ | | | | | | |
| | PYNYYMDVWG | GTKVEIK | | | | | | |
| | KGTTVTVSS | (SEQ ID | | | | | | |
| | (SEQ ID | NO: 592) | | | | | | |
| | NO: 1470) | | | | | | | |
| PMAB48 | EVQLLESGGG | DIQMTQSPSS | FTFSD | SYISG | CARDR | RASQS | SSLQS | QQYKS |
| | LVQPGGSLRL | LSASVGDRVT | FWMH | DSGYT | PYSYY | VSRSL | (SEQ | YPVT |
| | SCAASGETES | ITCRASQSVS | (SEQ | NYA | MDVW | A | ID | (SEQ |
| | DFWMHWVRQA | RSLAWYQQKP | ID | (SEQ | (SEQ | (SEQ | NO: | ID |
| | PGKGLEWISY | GKAPKLLIYA | NO: | ID | ID | ID | 1497) | NO: |
| | ISGDSGYTNY | ASSLQSGVPS | 1493) | NO: | NO: | NO: | | 1498) |
| | ADSVKGRFTI | RFSGSGSGTD | | 1494) | 1527) | 1496) | | |
| | SRDNSKNTLY | FTLTISSLQP | | | | | | |
| | LQMNSLRAED | EDFATYYCQQ | | | | | | |
| | TAVYYCARDR | YKSYPVTFGQ | | | | | | |
| | PYSYYMDVWG | GTKVEIK | | | | | | |
| | KGTTVTVSS | (SEQ ID | | | | | | |
| | (SEQ ID | NO: 592) | | | | | | |
| | NO: 1471) | | | | | | | |
| PMAB49 | EVQLLESGGG | DIQMTQSPSS | FTFSD | SYISG | CARDR | RASQS | SSLQS | QQYKS |
| | LVQPGGSLRL | LSASVGDRVT | FWMH | DSGYT | PYYYD | VSRSL | (SEQ | YPVT |
| | SCAASGFTFS | ITCRASQSVS | (SEQ | NYA | MDVW | A | ID | (SEQ |
| | DFWMHWVRQA | RSLAWYQQKP | ID | (SEQ | (SEQ | (SEQ | NO: | ID |
| | PGKGLEWISY | GKAPKLLIYA | NO: | ID | ID | ID | 1497) | NO: |
| | ISGDSGYTNY | ASSLQSGVPS | 1493) | NO: | NO: | NO: | | 1498) |
| | ADSVKGRFTI | RFSGSGSGTD | | 1494) | 1507) | 1496) | | |
| | SRDNSKNTLY | FTLTISSLQP | | | | | | |
| | LQMNSLRAED | EDFATYYCQQ | | | | | | |
| | TAVYYCARDR | YKSYPVTFGQ | | | | | | |
| | PYYYDMDVWG | GTKVEIK | | | | | | |
| | KGTTVTVSS | (SEQ ID | | | | | | |
| | (SEQ ID | NO: 592) | | | | | | |
| | NO: 1472) | | | | | | | |
| PMAB50 | EVQLLESGGG | DIQMTQSPSS | FTFSD | SYISG | CARDR | RASQS | SSLQS | QQYKS |
| | LVQPGGSLRL | LSASVGDRVT | FWMH | DSGYT | PYYYE | VSRSL | (SEQ | YPVT |
| | SCAASGFTES | ITCRASQSVS | (SEQ | NYA | MDVW | A | ID | (SEQ |
| | DFWMHWVRQA | RSLAWYQQKP | ID | (SEQ | (SEQ | (SEQ | NO: | ID |
| | PGKGLEWISY | GKAPKLLIYA | NO: | ID | ID | ID | 1497) | NO: |
| | ISGDSGYTNY | ASSLQSGVPS | 1493) | NO: | NO: | NO: | | 1498) |
| | ADSVKGRFTI | RFSGSGSGTD | | 1494) | 1528) | 1496) | | |
| | SRDNSKNTLY | FTLTISSLQP | | | | | | |
| | LQMNSLRAED | EDFATYYCQQ | | | | | | |
| | TAVYYCARDR | YKSYPVTFGQ | | | | | | |
| | PYYYEMDVWG | GTKVEIK | | | | | | |
| | KGTTVTVSS | (SEQ ID | | | | | | |
| | (SEQ ID | NO: 592) | | | | | | |
| | NO: 1473) | | | | | | | |
| PMAB51 | EVQLLESGGG | DIQMTQSPSS | FTFSD | SYISG | CARDR | RASQS | SSLQS | QQYKS |
| | LVQPGGSLRL | LSASVGDRVT | FWMH | DSGYT | PYYYK | VSRSL | (SEQ | YPVT |
| | SCAASGFTES | ITCRASQSVS | (SEQ | NYA | MDVW | A | ID | (SEQ |
| | DFWMHWVRQA | RSLAWYQQKP | ID | (SEQ | (SEQ | (SEQ | NO: | ID |
| | PGKGLEWISY | GKAPKLLIYA | NO: | ID | ID | ID | 1497) | NO: |
| | ISGDSGYTNY | ASSLQSGVPS | 1493) | NO: | NO: | NO: | | 1498) |
| | ADSVKGRFTI | RFSGSGSGTD | | 1494) | 1529) | 1496) | | |
| | SRDNSKNTLY | FTLTISSLQP | | | | | | |
| | LQMNSLRAED | EDFATYYCQQ | | | | | | |
| | TAVYYCARDR | YKSYPVTFGQ | | | | | | |
| | PYYYKMDVWG | GTKVEIK | | | | | | |
| | KGTTVTVSS | (SEQ ID | | | | | | |
| | (SEQ ID | NO: 592) | | | | | | |
| | NO: 1474) | | | | | | | |
| PMAB52 | EVQLLESGGG | DIQMTQSPSS | FTFSD | SYISG | CARDR | RASQS | SSLQS | QQYKS |
| | LVQPGGSLRL | LSASVGDRVT | FWMH | DSGYT | PYYYS | VSRSL | (SEQ | YPVT |
| | SCAASGFTFS | ITCRASQSVS | (SEQ | NYA | MDVW | A | ID | (SEQ |
| | DFWMHWVRQA | RSLAWYQQKP | ID | (SEQ | (SEQ | (SEQ | NO: | ID |
| | PGKGLEWISY | GKAPKLLIYA | NO: | ID | ID | ID | 1497) | NO: |
| | ISGDSGYTNY | ASSLQSGVPS | 1493) | NO: | NO: | NO: | | 1498) |
| | ADSVKGRFTI | RFSGSGSGTD | | 1494) | 1530) | 1496) | | |
| | SRDNSKNTLY | FTLTISSLQP | | | | | | |
| | LQMNSLRAED | EDFATYYCQQ | | | | | | |
| | TAVYYCARDR | YKSYPVTFGQ | | | | | | |
| | PYYYSMDVWG | GTKVEIK | | | | | | |
| | KGTTVTVSS | (SEQ ID | | | | | | |
| | (SEQ ID | NO: 592) | | | | | | |
| | NO: 1475) | | | | | | | |
| PMAB53 | EVQLLESGGG | DIQMTQSPSS | FTFSS | SYISG | CARDR | RASQS | SSLQS | QQYKS |
| | LVQPGGSLRL | LSASVGDRVT | YWMH | SGGYT | PYYYD | ISSSL | (SEQ | YPVT |
| | SCAASGFTFS | ITCRASQSIS | (SEQ | NYA | IDVW | A | ID | (SEQ |
| | SYWMHWVRQA | SSLAWYQQKP | ID | (SEQ | (SEQ | (SEQ | NO: | ID |
| | PGKGLEWVSY | GKAPKLLIYA | NO: | ID | ID | ID | 1497) | NO: |
| | ISGSGGYTNY | ASSLQSGVPS | 1499) | NO: | NO: | NO: | | 1498) |
| | ADSVKGRFTI | RFSGSGSGTD | | 1506) | 1531) | 1502) | | |
| | SRDNSKNTLY | FTLTISSLQP | | | | | | |
| | LQMNSLRAED | EDFATYYCQQ | | | | | | |
| | TAVYYCARDR | YKSYPVTFGQ | | | | | | |
| | PYYYDIDVWG | GTKVEIK | | | | | | |
| | KGTTVTVSS | (SEQ ID | | | | | | |
| | (SEQ ID | | | | | | | |
| | NO: 1477) | NO: 1367) | | | | | | |
| PMAB55 | EVQLLESGGG | DIQMTQSPSS | FTFSS | SYISG | CARDR | RASQS | SSLQS | QQYKS |
| | LVQPGGSLRL | LSASVGDRVT | YWMH | SGGYT | PYYYD | ISSSL | (SEQ | YPVT |
| | SCAASGFTFS | ITCRASQSIS | (SEQ | NYA | LDVW | A | ID | (SEQ |
| | SYWMHWVRQA | SSLAWYQQKP | ID | (SEQ | (SEQ | (SEQ | NO: | ID |
| | PGKGLEWVSY | GKAPKLLIYA | NO: | ID | ID | ID | 1497) | NO: |
| | ISGSGGYTNY | ASSLQSGVPS | 1499) | NO: | NO: | NO: | | 1498) |
| | ADSVKGRFTI | RFSGSGSGTD | | 1506) | 1532) | 1502) | | |
| | SRDNSKNTLY | FTLTISSLQP | | | | | | |
| | LQMNSLRAED | EDFATYYCQQ | | | | | | |
| | TAVYYCARDR | YKSYPVTFGQ | | | | | | |
| | PYYYDLDVWG | GTKVEIK | | | | | | |
| | KGTTVTVSS | (SEQ ID | | | | | | |
| | (SEQ ID | NO: 1367) | | | | | | |
| | NO: 1480) | | | | | | | |

[0430] In some embodiments, the therapeutic compound comprises one or more sequences, or a combination thereof, selected from the Table 14.

[0431] In some embodiments, the therapeutic a Fab PD-1 antibody fused via a linker to a scFv MAdCAM antibody. In some embodiments, the Fab PD-1 antibody is fused to a IgG1 constant domain, wherein said IgG1 constant domain is fused to scFv MAdCAM antibody via a Fc-scFv linker. In some embodiment the scFv MAdCAM antibody comprises an internal scFv linker. In some embodiments, the linker is a peptide linker. In some embodiments, the peptide linker is a glycine/serine linker as provided herein.

[0432] In some embodiments, the PD-1-MAdCAM antibody comprises one or more sequences as shown in Table 12. In some embodiments, the MAdCAM antibody comprises a combination of one or more sequence as shown in Table 12. In some embodiments, the anti-PD-1 antibody is in the Fab format and the anti-MAdCAM antibody is in a scFV format as illustrated in Table 12. In some embodiments, the Fab portion of the antibody comprises a CDR1 from any one of clones PMAB1-54 of Table 13, a CDR2 from any one of clones PMAB1-54 of Table 13, and a CDR3 from any one of clones PMAB1-54 of Table 13. In some embodiments, the Fab portion of the antibody comprises a LCDR1 from any one of clones PMAB1-54 of Table 13, a LCDR2 from any one of clones PMAB1-54 of Table 13, and a LCDR3 from any one of clones PMAB1-54 of Table 13. In some embodiments, the scFv portion of the antibody comprises a CDR1 from any one of clones PMAB1-55 of Table 14, a CDR2 from any one of clones PMAB1-55 of Table 14, and a CDR3 from any one of clones PMAB1-55 of Table 14. In some embodiments, the scFc portion of the antibody comprises a LCDR1 from any one of clones PMAB1-55 of Table 14, a LCDR2 from any one of clones PMAB1-55 of Table 14, and a LCDR3 from any one of clones PMAB1-55 of Table 14. In some embodiments, the amino acid residues of the CDRs shown above contain mutations. In some embodiments, the CDRs contain 0, 1, 2, 3, 4, 5, 6, 7, 8, 9, or 10 substitutions or mutations. In some embodiments, the substitution is a conservative substitution.

[0433] In some embodiments, the PD-1-MAdCAM antibody has a VH region selected from any one of clones PMAB1-77 of Table 12 and a VL region selected from any one of clones PMAB1-77 as set forth in of Table 12. In some embodiments, the antibody comprises a Fab CDR1 from any one of clones PMAB1-54 of Table 13, a Fab CDR2 from any one of clones PMAB1-54 of Table 13, and a Fab CDR3 from any one of clones PMAB1-54 of Table 13, a scFv CDR1 from any one of clones PMAB1-55 of Table 14, a Fab CDR2 from any one of clones PMAB1-55 of Table 14, and a Fab CDR3 from any one of clones PMAB1-55 of Table 14.

[0434] In some embodiments, the variable heavy chain has a Fab HCDR1, HCDR2, and a HCDR3 as set forth for PMAB1 in Table 13. In some embodiments, the variable heavy chain has a Fab HCDR1, HCDR2, and a HCDR3 as set forth for PMAB15 in Table 13. In some embodiments, the variable heavy chain has a Fab HCDR1, HCDR2, and a HCDR3 as set forth for PMAB17 in Table 13. In some embodiments, the variable heavy chain has a Fab HCDR1, HCDR2, and a HCDR3 as set forth for PMAB18 in Table 13. In some embodiments, the variable heavy chain has a Fab HCDR1, HCDR2, and a HCDR3 as set forth for PMAB53 in Table 13. In some embodiments, the variable heavy chain has a Fab HCDR1, HCDR2, and a HCDR3 as set forth for PMAB54 in Table 13.

[0435] In some embodiments, the variable light chain has a Fab LCDR1, LCDR2, and a LCDR3 as set forth for PMAB1 in Table 13. In some embodiments, the variable light chain has a Fab LCDR1, LCDR2, and a LCDR3 as set forth for PMAB15 in Table 13. In some embodiments, the variable light chain has a Fab LCDR1, LCDR2, and a LCDR3 as set forth for PMAB17 in Table 13. In some embodiments, the variable light chain has a Fab LCDR1, LCDR2, and a LCDR3 as set forth for PMAB18 in Table 13. In some embodiments, the variable light chain has a Fab LCDR1, LCDR2, and a LCDR3 as set forth for PMAB53 in Table 13. In some embodiments, the variable light chain has a Fab LCDR1, LCDR2, and a LCDR3 as set forth for PMAB54 in Table 13.

[0436] In some embodiments, the variable heavy chain has a scFv HCDR1, HCDR2, and a HCDR3 as set forth for PMAB1 in Table 14. In some embodiments, the variable heavy chain has a scFv HCDR1, HCDR2, and a HCDR3 as set forth for PMAB2 in Table 14. In some embodiments, the variable heavy chain has a scFv HCDR1, HCDR2, and a HCDR3 as set forth for PMAB3 in Table 14. In some embodiments, the variable heavy chain has a scFv HCDR1, HCDR2, and a HCDR3 as set forth for PMAB5 in Table 14. In some embodiments, the variable heavy chain has a scFv HCDR1, HCDR2, and a HCDR3 as set forth for PMAB6 in Table 14. In some embodiments, the variable heavy chain has a scFv HCDR1, HCDR2, and a HCDR3 as set forth for PMAB7 in Table 14. In some embodiments, the variable heavy chain has a scFv HCDR1, HCDR2, and a HCDR3 as set forth for PMAB8 in Table 14. In some embodiments, the variable heavy chain has a scFv HCDR1, HCDR2, and a HCDR3 as set forth for PMAB9 in Table 14. In some embodiments, the variable heavy chain has a scFv HCDR1, HCDR2, and a HCDR3 as set forth for PMAB10 in Table 14. In some embodiments, the variable heavy chain has a scFv HCDR1, HCDR2, and a HCDR3 as set forth for PMAB11 in Table 14. In some embodiments, the variable heavy chain has a scFv HCDR1, HCDR2, and a HCDR3 as set forth for PMAB12 in Table 14. In some embodiments, the variable heavy chain has a scFv HCDR1, HCDR2, and a HCDR3 as set forth for PMAB13 in Table 14. In some embodiments, the variable heavy chain has a scFv HCDR1, HCDR2, and a HCDR3 as set forth for PMAB14 in Table 14. In some embodiments, the variable heavy chain has a scFv HCDR1, HCDR2, and a HCDR3 as set forth for PMAB15 in Table 14. In some embodiments, the variable heavy chain has a scFv HCDR1, HCDR2, and a HCDR3 as set forth for PMAB16 in Table 14. In some embodiments, the variable heavy chain has a scFv HCDR1, HCDR2, and a HCDR3 as set forth for PMAB19 in Table 14. In some embodiments, the variable heavy chain has a scFv HCDR1, HCDR2, and a HCDR3 as set forth for PMAB20 in Table 14. In some embodiments, the variable heavy chain has a scFv HCDR1, HCDR2, and a HCDR3 as set forth for PMAB21 in Table 14. In some embodiments, the variable heavy chain has a scFv HCDR1, HCDR2, and a HCDR3 as set forth for PMAB22 in Table 14. In some embodiments, the variable heavy chain has a scFv HCDR1, HCDR2, and a HCDR3 as set forth for PMAB23 in Table 14. In some embodiments, the variable heavy chain has a scFv HCDR1, HCDR2, and a HCDR3 as set forth for PMAB24 in Table 14. In some embodiments, the variable heavy chain has a scFv HCDR1, HCDR2, and a HCDR3 as set forth for PMAB25 in Table 14. In some embodiments, the variable heavy chain has a scFv HCDR1, HCDR2, and a HCDR3 as set forth for PMAB26 in Table 14. In some embodiments, the variable heavy chain has a scFv HCDR1, HCDR2, and a HCDR3 as set forth for PMAB27 in Table 14. In some embodiments, the variable heavy chain has a scFv HCDR1, HCDR2, and a HCDR3 as set forth for PMAB28 in Table 14. In some embodiments, the variable heavy chain has a scFv HCDR1, HCDR2, and a HCDR3 as set forth for PMAB29 in Table 14. In some embodiments, the variable heavy chain has a scFv HCDR1, HCDR2, and a HCDR3 as set forth for PMAB30 in Table 14. In some embodiments, the variable heavy chain has a scFv HCDR1, HCDR2, and a HCDR3 as set forth for PMAB31 in Table 14. In some embodiments, the variable heavy chain has a scFv HCDR1, HCDR2, and a HCDR3 as set forth for PMAB32 in Table 14. In some embodiments, the variable heavy chain has a scFv HCDR1, HCDR2, and a HCDR3 as set forth for PMAB33 in Table 14. In some embodiments, the variable heavy chain has a scFv HCDR1, HCDR2, and a HCDR3 as set forth for PMAB34 in Table 14. In some embodiments, the variable heavy chain has a scFv HCDR1, HCDR2, and a HCDR3 as set forth for PMAB35 in Table 14. In some embodiments, the variable heavy chain has a scFv HCDR1, HCDR2, and a HCDR3 as set forth for PMAB36 in Table 14. In some embodiments, the variable heavy chain has a scFv HCDR1, HCDR2, and a HCDR3 as set forth for PMAB37 in Table 14. In some embodiments, the variable heavy chain has a scFv HCDR1, HCDR2, and a HCDR3 as set forth for PMAB38 in Table 14. In some embodiments, the variable heavy chain has a scFv HCDR1, HCDR2, and a HCDR3 as set forth for PMAB39 in Table 14. In some embodiments, the variable heavy chain has a scFv HCDR1, HCDR2, and a HCDR3 as set forth for PMAB40 in Table 14. In some embodiments, the variable heavy chain has a scFv HCDR1, HCDR2, and a HCDR3 as set forth for PMAB41 in Table 14. In some embodiments, the variable heavy chain has a scFv HCDR1, HCDR2, and a HCDR3 as set forth for PMAB42 in Table 14. In some embodiments, the variable heavy chain has a scFv HCDR1, HCDR2, and a HCDR3 as set forth for PMAB43 in Table 14. In some embodiments, the variable heavy chain has a scFv HCDR1, HCDR2, and a HCDR3 as set forth for PMAB44 in Table 14. In some embodiments, the variable heavy chain has a scFv HCDR1, HCDR2, and a HCDR3 as set forth for PMAB45 in Table 14. In some embodiments, the variable heavy chain has a scFv HCDR1, HCDR2, and a HCDR3 as set forth for PMAB46 in Table 14. In some embodiments, the variable heavy chain has a scFv HCDR1, HCDR2, and a HCDR3 as set forth for PMAB47 in Table 14. In some embodiments, the variable heavy chain has a scFv HCDR1, HCDR2, and a HCDR3 as set forth for PMAB48 in Table 14. In some embodiments, the variable heavy chain has a scFv HCDR1, HCDR2, and a HCDR3 as set forth for PMAB49 in Table 14. In some embodiments, the variable heavy chain has a scFv HCDR1, HCDR2, and a HCDR3 as set forth for PMAB50 in Table 14. In some embodiments, the variable heavy chain has a scFv HCDR1, HCDR2, and a HCDR3 as set forth for PMAB51 in Table 14. In some embodiments, the variable heavy chain has a scFv HCDR1, HCDR2, and a HCDR3 as set forth for PMAB52 in Table 14. In some embodiments, the variable heavy chain has a scFv HCDR1, HCDR2, and a HCDR3 as set forth for PMAB53 in Table 14. In some embodiments, the variable heavy chain has a scFv HCDR1, HCDR2, and a HCDR3 as set forth for PMAB55 in Table 14.

[0437] In some embodiments, the variable light chain has a scFv LCDR1, LCDR2, and a LCDR3 as set forth for PMAB1 in Table 14. In some embodiments, the variable light chain has a scFv LCDR1, LCDR2, and a LCDR3 as set forth for PMAB2 in Table 14. In some embodiments, the variable light chain has a scFv LCDR1, LCDR2, and a LCDR3 as set forth for PMAB3 in Table 14. In some embodiments, the variable light chain has a scFv LCDR1, LCDR2, and a LCDR3 as set forth for PMAB5 in Table 14. In some embodiments, the variable light chain has a scFv LCDR1, LCDR2, and a LCDR3 as set forth for PMAB6 in Table 14. In some embodiments, the variable light chain has a scFv LCDR1, LCDR2, and a LCDR3 as set forth for PMAB7 in Table 14. In some embodiments, the variable light chain has a scFv LCDR1, LCDR2, and a LCDR3 as set forth for PMAB8 in Table 14. In some embodiments, the variable light chain has a scFv LCDR1, LCDR2, and a LCDR3 as set forth for PMAB9 in Table 14. In some embodiments, the variable light chain has a scFv LCDR1, LCDR2, and a LCDR3 as set forth for PMAB10 in Table 14. In some embodiments, the variable light chain has a scFv LCDR1, LCDR2, and a LCDR3 as set forth for PMAB11 in Table 14. In some embodiments, the variable light chain has a scFv LCDR1, LCDR2, and a LCDR3 as set forth for PMAB12 in Table 14. In some embodiments, the variable light chain has a scFv LCDR1, LCDR2, and a LCDR3 as set forth for PMAB13 in Table 14. In some embodiments, the variable light chain has a scFv LCDR1, LCDR2, and a LCDR3 as set forth for PMAB14 in Table 14. In some embodiments, the variable light chain has a scFv LCDR1, LCDR2, and a LCDR3 as set forth for PMAB15 in Table 14. In some embodiments, the variable light chain has a scFv LCDR1, LCDR2, and a LCDR3 as set forth for PMAB16 in Table 14. In some embodiments, the variable light chain has a scFv LCDR1, LCDR2, and a LCDR3 as set forth for PMAB19 in Table 14. In some embodiments, the variable light chain has a scFv LCDR1, LCDR2, and a LCDR3 as set forth for PMAB20 in Table 14. In some embodiments, the variable light chain has a scFv LCDR1, LCDR2, and a LCDR3 as set forth for PMAB21 in Table 14. In some embodiments, the variable light chain has a scFv LCDR1, LCDR2, and a LCDR3 as set forth for PMAB22 in Table 14. In some embodiments, the variable light chain has a scFv LCDR1, LCDR2, and a LCDR3 as set forth for PMAB23 in Table 14. In some embodiments, the variable light chain has a scFv LCDR1, LCDR2, and a LCDR3 as set forth for PMAB24 in Table 14. In some embodiments, the variable light chain has a scFv LCDR1, LCDR2, and a LCDR3 as set forth for PMAB25 in Table 14. In some embodiments, the variable light chain has a scFv LCDR1, LCDR2, and a LCDR3 as set forth for PMAB26 in Table 14. In some embodiments, the variable light chain has a scFv LCDR1, LCDR2, and a LCDR3 as set forth for PMAB27 in Table 14. In some embodiments, the variable light chain has a scFv LCDR1, LCDR2, and a LCDR3 as set forth for PMAB28 in Table 14. In some embodiments, the variable light chain has a scFv LCDR1, LCDR2, and a LCDR3 as set forth for PMAB29 in Table 14. In some embodiments, the variable light chain has a scFv LCDR1, LCDR2, and a LCDR3 as set forth for PMAB30 in Table 14. In some embodiments, the variable light chain has a scFv LCDR1, LCDR2, and a LCDR3 as set forth for PMAB31 in Table 14. In some embodiments, the variable light chain has a scFv LCDR1, LCDR2, and a LCDR3 as set forth for PMAB32 in Table 14. In some embodiments, the variable light chain has a scFv LCDR1, LCDR2, and a LCDR3 as set forth for PMAB33 in Table 14. In some embodiments, the variable light chain has a scFv LCDR1, LCDR2, and a LCDR3 as set forth for PMAB34 in Table 14. In some embodiments, the variable light chain has a scFv LCDR1, LCDR2, and a LCDR3 as set forth for PMAB35 in Table 14. In some embodiments, the variable light chain has a scFv LCDR1, LCDR2, and a LCDR3 as set forth for PMAB36 in Table 14. In some embodiments, the variable light chain has a scFv LCDR1, LCDR2, and a LCDR3 as set forth for PMAB37 in Table 14. In some embodiments, the variable light chain has a scFv LCDR1, LCDR2, and a LCDR3 as set forth for PMAB38 in Table 14. In some embodiments, the variable light chain has a scFv LCDR1, LCDR2, and a LCDR3 as set forth for PMAB39 in Table 14. In some embodiments, the variable light chain has a scFv LCDR1, LCDR2, and a LCDR3 as set forth for PMAB40 in Table 14. In some embodiments, the variable light chain has a scFv LCDR1, LCDR2, and a LCDR3 as set forth for PMAB41 in Table 14. In some embodiments, the variable light chain has a scFv LCDR1, LCDR2, and a LCDR3 as set forth for PMAB42 in Table 14. In some embodiments, the variable light chain has a scFv LCDR1, LCDR2, and a LCDR3 as set forth for PMAB43 in Table 14. In some embodiments, the variable light chain has a scFv LCDR1, LCDR2, and a LCDR3 as set forth for PMAB44 in Table 14. In some embodiments, the variable light chain has a scFv LCDR1, LCDR2, and a LCDR3 as set forth for PMAB45 in Table 14. In some embodiments, the variable light chain has a scFv LCDR1, LCDR2, and a LCDR3 as set forth for PMAB46 in Table 14. In some embodiments, the variable light chain has a scFv LCDR1, LCDR2, and a LCDR3 as set forth for PMAB47 in Table 14. In some embodiments, the variable light chain has a scFv LCDR1, LCDR2, and a LCDR3 as set forth for PMAB48 in Table 14. In some embodiments, the variable light chain has a scFv LCDR1, LCDR2, and a LCDR3 as set forth for PMAB49 in Table 14. In some embodiments, the variable light chain has a scFv LCDR1, LCDR2, and a LCDR3 as set forth for PMAB50 in Table 14. In some embodiments, the variable light chain has a scFv LCDR1, LCDR2, and a LCDR3 as set forth for PMAB51 in Table 14. In some embodiments, the variable light chain has a scFv LCDR1, LCDR2, and a LCDR3 as set forth for PMAB52 in Table 14. In some embodiments, the variable light chain has a scFv LCDR1, LCDR2, and a LCDR3 as set forth for PMAB53 in Table 14. In some embodiments, the variable light chain has a scFv LCDR1, LCDR2, and a LCDR3 as set forth for PMAB55 in Table 14.

[0438] In some embodiments, the CDRS are swapped for one another. For example, the Fab HCDR1 of clone PMAB1 can be substituted for the Fab HCDR1 of clone PMAB2, or vice versa. This CDR swapping can be done for any of the Fab HCDRs of the clones provided herein (e.g., HCDR1 for HCDR1; HCDR2 for HCDR2; or HCDR3 for HCDR3) or the Fab LCDRs (e.g., LCDR1 for LCDR1; LCDR2 for LCDR2; or LCDR3 for LCDR3). Furthermore, the CDR swapping can be done for any of the scFv HCDRs of the clones provided herein (e.g., HCDR1 for HCDR1; HCDR2 for HCDR2; or HCDR3 for HCDR3) or the scFv LCDRs (e.g., LCDR1 for LCDR1; LCDR2 for LCDR2; or LCDR3 for LCDR3). Therefore, in some embodiments, the antibody comprises a Fab HCDR1 as set forth in any of PMAB1-54 of Table 13, a HCDR2 as set forth in any of PMAB1-54 of Table 13, a HCDR3 as set forth in any of PMAB1-54 of Table 13, a LCDR1 as set forth in any of PMAB1-54 of Table 13, a LCDR2 as set forth in any of PMAB1-54 of Table 13, a LCDR3 as set forth in any of PMAB1-54 of Table 13, or a variant of any of the foregoing. In some embodiments, the antibody comprises a scFv HCDR1 as set forth in any of PMAB1-55 of Table 14, a HCDR2 as set forth in any of PMAB1-55 of Table 14, a HCDR3 as set forth in any of PMAB1-55 of Table 14, a LCDR1 as set forth in any of PMAB1-55 of Table 14, a LCDR2 as set forth in any of PMAB1-55 of Table 14, a LCDR3 as set forth in any of PMAB1-55 of Table 14, or a variant of any of the foregoing.

[0439] In some embodiments, the amino acid residues of the CDRs shown above contain mutations. In some embodiments, the CDRs contain 0, 1, 2, 3, 4, 5, 6, 7, 8, 9, or 10 substitutions or mutations. In some embodiments, the substitution is a conservative substitution.

[0440] In some embodiments, the anti-MAdCAM antibody, or antigen binding fragment thereof, comprises i) a heavy chain variable region comprising heavy chain CDR1, CDR2, and CDR3 sequences, wherein the heavy chain CDR1 sequence has an amino acid sequence having at least one amino acid substitution relative to SEQ ID NO: 1499; the heavy chain CDR2 has an amino acid sequence having at least one amino acid substitution relative to SEQ ID NO: 1506; and the heavy chain CDR3 has an amino acid sequence having at least one amino acid substitution relative to SEQ ID NOs: 1507, 1531, or 1532; and (ii) a light chain variable region comprising light chain CDR1, CDR2, and CDR3 sequences, wherein the light chain CDR1 sequence has an amino acid sequence having at least one amino acid substitution relative to SEQ ID NO: 1502; the light chain CDR2 has an amino acid sequence having at least one amino acid substitution relative to SEQ ID NO: 1497; and the light chain CDR3 has an amino acid sequence having at least one amino acid substitution relative to SEQ ID NO: 1498.

[0441] In some embodiments, the anti-MAdCAM antibody, or antigen binding fragment thereof, comprises i) a heavy chain variable region comprising heavy chain CDR1, CDR2, and CDR3 sequences, wherein the heavy chain CDR1 sequence has an amino acid sequence having one or zero amino acid substitution relative to SEQ ID NO: 1499; the heavy chain CDR2 has an amino acid sequence having one or zero amino acid substitution relative to SEQ ID NO: 1506; and the heavy chain CDR3 has an amino acid sequence having one or zero amino acid substitution relative to SEQ ID NOs: 1507, 1531, or 1532; and (ii) a light chain variable region comprising light chain CDR1, CDR2, and CDR3 sequences, wherein the light chain CDR1 sequence has an amino acid sequence having one or zero amino acid substitution relative to SEQ ID NO: 1502; the light chain CDR2 has an amino acid sequence having one or zero amino acid substitution relative to SEQ ID NO: 1497; and the light chain CDR3 has an amino acid sequence having one or zero amino acid substitution relative to SEQ ID NO: 1498.

[0442] In some embodiments, the anti-MAdCAM antibody, or antigen binding fragment thereof, heavy chain variable region comprises a heavy chain CDR1 comprising the amino acid sequence of SEQ ID NO: 1499, a heavy chain CDR2 comprising the amino acid sequence of SEQ ID NO: 1506, and a heavy chain CDR3 comprising the amino acid sequence of SEQ ID NO: 1507. In some embodiments, the anti-MAdCAM antibody, or antigen binding fragment thereof, heavy chain variable region comprises a heavy chain CDR1 comprising the amino acid sequence of SEQ ID NO: 1499, a heavy chain CDR2 comprising the amino acid sequence of SEQ ID NO: 1506, and a heavy chain CDR3 comprising the amino acid sequence of SEQ ID NO: 1531. In some embodiments, the anti-MAdCAM antibody, or antigen binding fragment thereof, heavy chain variable region comprises a heavy chain CDR1 comprising the amino acid sequence of SEQ ID NO: 1499, a heavy chain CDR2 comprising the amino acid sequence of SEQ ID NO: 1506, and a heavy chain CDR3 comprising the amino acid sequence of SEQ ID NO: 1532. In some embodiments, the anti-MAdCAM antibody, or antigen binding fragment thereof, light chain variable region comprises a light chain CDR1 comprising the amino acid sequence of SEQ ID NO: 1502, a light chain CDR2 comprising the amino acid sequence of SEQ ID NO: 1497, and a light chain CDR3 comprising the amino acid sequence of SEQ ID NO: 1498.

[0443] In some embodiments, the antibody that binds to PD-1 comprises i) a heavy chain variable region comprising heavy chain CDR1, CDR2, and CDR3 sequences, wherein the heavy chain CDR1 sequence has an amino acid sequence having at least one amino acid substitution relative to SEQ ID NO: 1481, or 1487; the heavy chain CDR2 has an amino acid sequence having at least one amino acid substitution relative to SEQ ID NO: 1482, or 1488; and the heavy chain CDR3 has an amino acid sequence having at least one amino acid substitution relative to SEQ ID NOs: 1483, or 1489; and (ii) a light chain variable region comprising light chain CDR1, CDR2, and CDR3 sequences, wherein the light chain CDR1 sequence has an amino acid sequence having at least one amino acid substitution relative to SEQ ID NO: 1484, 1490, or 1214; the light chain CDR2 has an amino acid sequence having at least one amino acid substitution relative to SEQ ID NO: 1485, or 1491; and the light chain CDR3 has an amino acid sequence having at least one amino acid substitution relative to SEQ ID NO: 1486, or 1492.

[0444] In some embodiments, a composition comprising an effector molecule linked to an antibody, or antigen binding fragment thereof, comprises:
[0445] a) the antibody in an scFv orientation comprising i) a heavy chain variable region comprising heavy chain CDR1, CDR2, and CDR3 sequences, wherein the heavy chain CDR1 sequence has an amino acid sequence having one or zero amino acid substitution relative to SEQ ID NO: 1499; the heavy chain CDR2 has an amino acid sequence having one or zero amino acid substitution relative to SEQ ID NO: 1506; and the heavy chain CDR3 has an amino acid sequence having one or zero amino acid substitution relative to SEQ ID NOs: 1507, 1531, or 1532; and (ii) a light chain variable region comprising light chain CDR1, CDR2, and CDR3 sequences, wherein the light chain CDR1 sequence has an amino acid sequence having one or zero amino acid substitution relative to SEQ ID NO: 1502; the light chain CDR2 has an amino acid sequence having one or zero amino acid substitution relative to SEQ ID NO: 1497; and the light chain CDR3 has an amino acid sequence having one or zero amino acid substitution relative to SEQ ID NO: 1498; and
[0446] b) the effector molecule in a Fab orientation comprising i) a heavy chain variable region comprising heavy chain CDR1, CDR2, and CDR3 sequences, wherein the heavy chain CDR1 sequence has an amino acid sequence having one or zero amino acid substitution relative to SEQ ID NO: 1481, or 1487; the heavy chain CDR2 has an amino acid sequence having one or zero amino acid substitution relative to SEQ ID NO: 1482, or 1488; and the heavy chain CDR3 has an amino acid sequence having one or zero amino acid substitution relative to SEQ ID NOs: 1483, or 1489; and (ii) a light chain variable region comprising light chain CDR1, CDR2, and CDR3 sequences, wherein the light chain CDR1 sequence has an amino acid sequence having one or zero amino acid substitution relative to SEQ ID NO: 1484, 1490, or 1214; the light chain CDR2 has an amino acid sequence having one or zero amino acid substitution relative to SEQ ID NO: 1485, or 1491; and the light chain CDR3 has an amino acid sequence having one or zero amino acid substitution relative to SEQ ID NO: 1486, or 1492.

[0447] In some embodiments, the composition comprising an effector molecule linked to an antibody, or antigen binding fragment thereof, comprises:
[0448] a) the antibody in an scFv orientation comprising i) a heavy chain variable region comprising heavy chain CDR1, CDR2, and CDR3 sequences, wherein the heavy chain CDR1 sequence has an amino acid sequence of SEQ ID NO: 1499; the heavy chain CDR2 has an amino acid sequence of SEQ ID NO: 1506; and the heavy chain CDR3 has an amino acid sequence of SEQ ID NOs: 1507, 1531, or 1532; and (ii) a light chain variable region comprising light chain CDR1, CDR2, and CDR3 sequences, wherein the light chain CDR1 sequence has an amino acid sequence of SEQ ID NO: 1502; the light chain CDR2 has an amino acid sequence of SEQ ID NO: 1497; and the light chain CDR3 has an amino acid sequence of SEQ ID NO: 1498; and
[0449] b) the effector molecule in a Fab orientation comprising i) a heavy chain variable region comprising heavy chain CDR1, CDR2, and CDR3 sequences, wherein the heavy chain CDR1 sequence has an amino acid sequence of SEQ ID NO: 1481, or 1487; the heavy chain CDR2 has an amino acid sequence of SEQ ID NO: 1482, or 1488; and the heavy chain CDR3 has an amino acid sequence of SEQ ID NOs: 1483, or 1489; and (ii) a light chain variable region comprising light chain CDR1, CDR2, and CDR3 sequences, wherein the light chain CDR1 sequence has an amino acid sequence of SEQ ID NO: 1484, 1490, or 1214; the light chain CDR2 has an amino acid sequence of SEQ ID NO: 1485, or 1491; and the light chain CDR3 has an amino acid sequence of SEQ ID NO: 1486, or 1492.

[0450] In some embodiments, the composition comprising an effector molecule linked to an antibody, or antigen binding fragment thereof, comprises:
[0451] a) the antibody in an scFv orientation comprising i) a heavy chain variable region comprising heavy chain CDR1, CDR2, and CDR3 sequences, wherein the heavy chain CDR1 sequence has the amino acid sequence of SEQ ID NO: 1499; the heavy chain CDR2 has the amino acid sequence of SEQ ID NO: 1506; and the heavy chain CDR3 has the amino acid sequence of SEQ ID NOs: 1507, or variants of any of the foregoing; and (ii) a light chain variable region comprising light chain CDR1, CDR2, and CDR3 sequences, wherein the light chain CDR1 sequence has the amino acid sequence of SEQ ID NO: 1502; the light chain CDR2 has the amino acid sequence of SEQ ID NO: 1497; and the light chain CDR3 has the amino acid sequence of SEQ ID NO: 1498, or variants of any of the foregoing; and
[0452] b) the effector molecule in a Fab orientation comprising i) a heavy chain variable region comprising heavy chain CDR1, CDR2, and CDR3 sequences, wherein the heavy chain CDR1 sequence has the amino acid sequence of SEQ ID NO: 1487; the heavy chain CDR2 has the amino acid sequence of SEQ ID NO: 1488; and the heavy chain CDR3 has the amino acid sequence of SEQ ID NO: 1489, or variants of any of the foregoing; and (ii) a light chain variable region comprising light chain CDR1, CDR2, and CDR3 sequences, wherein the light chain CDR1 sequence has the amino acid sequence of SEQ ID NO: 1490; the light chain CDR2 has the amino acid sequence of SEQ ID NO: 1491; and the light chain CDR3 has the amino acid sequence of SEQ ID NO: 1492, or variants of any of the foregoing.

[0453] In some embodiments, the composition comprising an effector molecule linked to an antibody, or antigen binding fragment thereof, comprises:
[0454] a) the antibody in an scFv orientation comprising i) a heavy chain variable region comprising heavy chain CDR1, CDR2, and CDR3 sequences, wherein the heavy chain CDR1 sequence has the amino acid sequence of SEQ ID NO: 1499; the heavy chain CDR2 has the amino acid sequence of SEQ ID NO: 1506; and the heavy chain CDR3 has the amino acid sequence of SEQ ID NOs: 1507, or variants of any of the foregoing; and (ii) a light chain variable region comprising light chain CDR1, CDR2, and CDR3 sequences, wherein the light chain CDR1 sequence has the amino acid sequence of SEQ ID NO: 1502; the light chain CDR2 has the amino acid sequence of SEQ ID NO: 1497; and the light chain CDR3 has the amino acid sequence of SEQ ID NO: 1498, or variants of any of the foregoing; and
[0455] b) the effector molecule in a Fab orientation comprising i) a heavy chain variable region comprising heavy chain CDR1, CDR2, and CDR3 sequences, wherein the heavy chain CDR1 sequence has the amino acid sequence of SEQ ID NO: 1487; the heavy chain CDR2 has the amino acid sequence of SEQ ID NO: 1482; and the heavy chain CDR3 has the amino acid sequence of SEQ ID NO: 1483, or variants of any of the foregoing; and (ii) a light chain variable region comprising light chain CDR1, CDR2, and CDR3 sequences, wherein the light chain CDR1 sequence has the amino acid sequence of SEQ ID NO: 1484; the light chain CDR2 has the amino acid sequence of SEQ ID NO: 1485; and the light chain CDR3 has the amino acid sequence of SEQ ID NO: 1486, or variants of any of the foregoing.

[0456] In some embodiments, the VH comprises a sequence as set forth in Table 12. In some embodiments, the VK comprises a sequence as set forth in Table 12. In some embodiments, the Ab comprises a VH and a VK as set forth for the clones in Table 12. In some embodiments, the VH and VK are linked by a linker. In some embodiments, the linker is a peptide linker as provided for herein. In some embodiments, the peptide linker is the linker as provided for in Table 12.

[0457] In some embodiments, the anti-MAdCAM antibody, or antigen binding fragment thereof, heavy chain variable region comprises an amino acid sequence having at least 90% identity to the amino acid sequence of SEQ ID NO: 1445, 1477, or 1480 and the anti-MAdCAM antibody light chain variable region comprises an amino acid sequence having at least 90% identity to the amino acid sequence of SEQ ID NO: 1367. In some embodiments, the anti-MAdCAM antibody, or antigen binding fragment thereof, heavy chain variable region comprises an amino acid sequence of SEQ ID NOs: 1445, 1477, or 1480 and the anti-MAdCAM antibody light chain variable region comprises an amino acid of SEQ ID NO: 1367.

[0458] In some embodiments, the anti-MAdCAM antibody, or antigen binding fragment thereof, comprises a light chain variable region comprising an amino acid sequence having at least 90% identity to an amino acid sequence selected from SEQ ID NOs: 592, 1360, 1361, 1362, 1363, 1364, 1365, 1366, 1367, 1368, 1369, 1370, 1371, 1372, 1373, 1374, 1375, 1376, 1380, 1381, 1382, 1383, 1384, 1385, 1386, 1464, 1465, 1466, 1467, or 1543; and a heavy chain variable region comprising an amino acid sequence having at least 90% identity to an amino acid sequence selected from SEQ ID NOs: 591, 1346, 1347, 1348, 1349, 1350, 1351, 1352, 1353, 1354, 1355, 1356, 1357, 1358, 1377, 1378, 1379, 1387, 1388, 1389, 1390, 1391, 1392, 1393, 1394, 1395, 1396, 1397, 1398, 1439, 1440, 1441, 1442, 1443, 1444, 1445, 1450, 1451, 1452, 1453, 1454, 1455, 1456, 1457, 1458, 1459, 1460, 1461, 1462, 1463, 1469, 1470, 1471, 1472, 1473, 1474, 1475, 1477, 1480, 1542, 1544, or 1545.

[0459] In some embodiments, the antibody that binds to PD-1 comprises a light chain variable region comprising an amino acid sequence having at least 90% identity to an amino acid sequence selected from SEQ ID NOs: 1359, 1449, or 1479; and the variable heavy chain comprising an amino acid sequence having at least 90% identity to an amino acid sequence selected from SEQ ID NOs: 1438, 1446, 1447, 1448, 1476, or 1478.

[0460] In some embodiments, the composition comprising an effector molecule linked to an antibody, or antigen binding fragment thereof, comprises: a) the antibody in an scFv orientation comprising a light chain variable region comprising an amino acid sequence having at least 95% identity to an amino acid sequence selected from SEQ ID NOs: 1367; and a heavy chain variable region comprising an amino acid sequence having at least 95% identity to an amino acid sequence selected from SEQ ID NOs: 1445; and b) the effector molecule in a Fab orientation comprising a light chain variable region comprising an amino acid sequence having at least 95% identity to an amino acid sequence selected from SEQ ID NOs: 1359, 1449, or 1479; and a heavy chain variable region comprising an amino acid sequence having at least 95% identity to an amino acid sequence selected from SEQ ID NOs: 1438, 1446, 1447, 1448, 1476, or 1478.

[0461] In some embodiments, the composition comprising an effector molecule linked to an antibody, or antigen binding fragment thereof, comprises:
[0462] a) the antibody in an scFv orientation comprising a light chain variable region comprising an amino acid sequence of SEQ ID NOs: 1367; and a heavy chain variable region comprising an amino acid sequence of SEQ ID NOs: 1445; and
[0463] b) the effector molecule in a Fab orientation comprising a light chain variable region comprising an amino acid sequence of SEQ ID NOs: 1359, 1449, or 1479; and a heavy chain variable region comprising an amino acid sequence of SEQ ID NOs: 1438, 1446, 1447, 1448, 1476, or 1478.

[0464] In some embodiments, the composition comprising an effector molecule linked to an antibody, or antigen binding fragment thereof, comprises:
[0465] a) the antibody in an scFv orientation comprising a light chain variable region comprising an amino acid sequence of SEQ ID NOs: 1367; and a heavy chain variable region comprising an amino acid sequence of SEQ ID NOs: 1445; and
[0466] b) the effector molecule in a Fab orientation comprising a light chain variable region comprising an amino acid sequence of SEQ ID NOs: 1449; and a heavy chain variable region comprising an amino acid sequence of SEQ ID NOs: 1448.

[0467] In some embodiments, the composition comprising an effector molecule linked to an antibody, or antigen binding fragment thereof, comprises:
[0468] a) the antibody in an scFv orientation comprising a light chain variable region comprising an amino acid sequence of SEQ ID NOs: 1367; and a heavy chain variable region comprising an amino acid sequence of SEQ ID NOs: 1445; and
[0469] b) the effector molecule in a Fab orientation comprising a light chain variable region comprising an amino acid sequence of SEQ ID NOs: 1359; and a heavy chain variable region comprising an amino acid sequence of SEQ ID NOs: 1476.

### Pharmaceutical Compositions and Kits

[0470] In another aspect, the present embodiments provide compositions, e.g., pharmaceutically acceptable compositions, which include a therapeutic compound described herein, formulated together with a pharmaceutically acceptable carrier. As used herein, “pharmaceutically acceptable carrier” includes any and all solvents, dispersion media, isotonic and absorption delaying agents, and the like that are physiologically compatible.

[0471] The carrier can be suitable for intravenous, intramuscular, subcutaneous, parenteral, rectal, local, ophthalmic, topical, spinal or epidermal administration (e.g. by injection or infusion). As used herein, the term “carrier” means a diluent, adjuvant, or excipient with which a compound is administered. In some embodiments, pharmaceutical carriers can also be liquids, such as water and oils, including those of petroleum, animal, vegetable or synthetic origin, such as peanut oil, soybean oil, mineral oil, sesame oil and the like. The pharmaceutical carriers can also be saline, gum acacia, gelatin, starch paste, talc, keratin, colloidal silica, urea, and the like. In addition, auxiliary, stabilizing, thickening, lubricating and coloring agents can be used. The carriers can be used in pharmaceutical compositions comprising the therapeutic compounds provided for herein.

[0472] The compositions and compounds of the embodiments provided for herein may be in a variety of forms. These include, for example, liquid, semi-solid and solid dosage forms, such as liquid solutions (e.g., injectable and infusible solutions), dispersions or suspensions, liposomes and suppositories. The preferred form depends on the intended mode of administration and therapeutic application. Typical compositions are in the form of injectable or infusible solutions. In some embodiments, the mode of administration is parenteral (e.g., intravenous, subcutaneous, intraperitoneal, intramuscular). In some embodiments, the therapeutic molecule is administered by intravenous infusion or injection. In another embodiment, the therapeutic molecule is administered by intramuscular or subcutaneous injection. In another embodiment, the therapeutic molecule is administered locally, e.g., by injection, or topical application, to a target site. The phrases “parenteral administration” and “administered parenterally” as used herein means modes of administration other than enteral and topical administration, usually by injection, and includes, without limitation, intravenous, intramuscular, intraarterial, intrathecal, intracapsular, intraorbital, intracardiac, intradermal, intraperitoneal, transtracheal, subcutaneous, subcuticular, intraarticular, subcapsular, subarachnoid, intraspinal, epidural and intrasternal injection and infusion.

[0473] Therapeutic compositions typically should be sterile and stable under the conditions of manufacture and storage. The composition can be formulated as a solution, microemulsion, dispersion, liposome, or other ordered structure suitable to high therapeutic molecule concentration. Sterile injectable solutions can be prepared by incorporating the active compound (i.e., therapeutic molecule) in the required amount in an appropriate solvent with one or a combination of ingredients enumerated above, as required, followed by filtered sterilization. Generally, dispersions are prepared by incorporating the active compound into a sterile vehicle that contains a basic dispersion medium and the required other ingredients from those enumerated above. In the case of sterile powders for the preparation of sterile injectable solutions, the preferred methods of preparation are vacuum drying and freeze-drying that yields a powder of the active ingredient plus any additional desired ingredient from a previously sterile-filtered solution thereof. The proper fluidity of a solution can be maintained, for example, by the use of a coating such as lecithin, by the maintenance of the required particle size in the case of dispersion and by the use of surfactants. Prolonged absorption of injectable compositions can be brought about by including in the composition an agent that delays absorption, for example, monostearate salts and gelatin.

[0474] As will be appreciated by the skilled artisan, the route and/or mode of administration will vary depending upon the desired results. In certain embodiments, the active compound may be prepared with a carrier that will protect the compound against rapid release, such as a controlled release formulation, including implants, transdermal patches, and microencapsulated delivery systems. Biodegradable, biocompatible polymers can be used, such as ethylene vinyl acetate, polyanhydrides, polyglycolic acid, collagen, polyorthoesters, and polylactic acid. Many methods for the preparation of such formulations are patented or generally known to those skilled in the art. See, e.g., Sustained and Controlled Release Drug Delivery Systems, J. R. Robinson, ed., Marcel Dekker, Inc., New York, 1978.

[0475] In certain embodiments, a therapeutic compound can be orally administered, for example, with an inert diluent or an assimilable edible carrier. The compound (and other ingredients, if desired) may also be enclosed in a hard or soft shell gelatin capsule, compressed into tablets, or incorporated directly into the subject's diet. For oral therapeutic administration, the compounds may be incorporated with excipients and used in the form of ingestible tablets, buccal tablets, troches, capsules, elixirs, suspensions, syrups, wafers, and the like. To administer a compound by other than parenteral administration, it may be necessary to coat the compound with, or co-administer the compound with, a material to prevent its inactivation. Therapeutic compositions can also be administered with medical devices known in the art.

[0476] Dosage regimens are adjusted to provide the optimum desired response (e.g., a therapeutic response). For example, a single bolus may be administered, several divided doses may be administered over time or the dose may be proportionally reduced or increased as indicated by the exigencies of the therapeutic situation. It is especially advantageous to formulate parenteral compositions in dosage unit form for ease of administration and uniformity of dosage.

[0477] Dosage unit form as used herein refers to physically discrete units suited as unitary dosages for the subjects to be treated; each unit contains a predetermined quantity of active compound calculated to produce the desired therapeutic effect in association with the required pharmaceutical carrier. The specification for the dosage unit forms are dictated by and directly dependent on (a) the unique characteristics of the active compound and the particular therapeutic effect to be achieved, and (b) the limitations inherent in the art of compounding such an active compound for the treatment of sensitivity in individuals.

[0478] An exemplary, non-limiting range for a therapeutically or prophylactically effective amount of a therapeutic compound is 0.1-30 mg/kg, more preferably 1-25 mg/kg. Dosages and therapeutic regimens of the therapeutic compound can be determined by a skilled artisan. In certain embodiments, the therapeutic compound is administered by injection (e.g., subcutaneously or intravenously) at a dose of about 1 to 40 mg/kg, e.g., 1 to 30 mg/kg, e.g., about 5 to 25 mg/kg, about 10 to 20 mg/kg, about 1 to 5 mg/kg, 1 to 10 mg/kg, 5 to 15 mg/kg, 10 to 20 mg/kg, 15 to 25 mg/kg, or about 3 mg/kg. The dosing schedule can vary from e.g., once a week to once every 2, 3, or 4 weeks. In one embodiment, the therapeutic compound is administered at a dose from about 10 to 20 mg/kg every other week. The therapeutic compound can be administered by intravenous infusion at a rate of more than 20 mg/min, e.g., 20-40 mg/min, and typically greater than or equal to 40 mg/min to reach a dose of about 35 to 440 mg/m², typically about 70 to 310 mg/m², and more typically, about 110 to 130 mg/m². In embodiments, the infusion rate of about 110 to 130 mg/m² achieves a level of about 3 mg/kg. In other embodiments, the therapeutic compound can be administered by intravenous infusion at a rate of less than 10 mg/min, e.g., less than or equal to 5 mg/min to reach a dose of about 1 to 100 mg/m², e.g., about 5 to 50 mg/m², about 7 to 25 mg/m², or, about 10 mg/m². In some embodiments, the therapeutic compound is infused over a period of about 30 min. It is to be noted that dosage values may vary with the type and severity of the condition to be alleviated. It is to be further understood that for any particular subject, specific dosage regimens should be adjusted over time according to the individual need and the professional judgment of the person administering or supervising the administration of the compositions, and that dosage ranges set forth herein are exemplary only and are not intended to limit the scope or practice of the claimed composition.

[0479] The pharmaceutical compositions may include a “therapeutically effective amount” or a “prophylactically effective amount” of a therapeutic molecule. A “therapeutically effective amount” refers to an amount effective, at dosages and for periods of time necessary, to achieve the desired therapeutic result. A therapeutically effective amount of a therapeutic molecule may vary according to factors such as the disease state, age, sex, and weight of the individual, and the ability of the therapeutic compound to elicit a desired response in the individual. A therapeutically effective amount is also one in which any toxic or detrimental effects of a therapeutic molecule is outweighed by the therapeutically beneficial effects. A “therapeutically effective dosage” preferably inhibits a measurable parameter, e.g., immune attack at least about 20%, more preferably by at least about 40%, even more preferably by at least about 60%, and still more preferably by at least about 80% relative to untreated subjects. The ability of a compound to inhibit a measurable parameter, e.g., immune attack, can be evaluated in an animal model system predictive of efficacy in transplant rejection or autoimmune disorders. Alternatively, this property of a composition can be evaluated by examining the ability of the compound to inhibit, such inhibition in vitro by assays known to the skilled practitioner.

[0480] A “prophylactically effective amount” refers to an amount effective, at dosages and for periods of time necessary, to achieve the desired prophylactic result. Typically, since a prophylactic dose is used in subjects prior to or at an earlier stage of disease, the prophylactically effective amount will be less than the therapeutically effective amount.

[0481] Also within the scope of the embodiments is a kit comprising a therapeutic compound described herein. The kit can include one or more other elements including: instructions for use; other reagents, e.g., a label, a therapeutic agent, or an agent useful for chelating, or otherwise coupling, a therapeutic molecule to a label or other therapeutic agent, or a radioprotective composition; devices or other materials for preparing a therapeutic molecule for administration; pharmaceutically acceptable carriers; and devices or other materials for administration to a subject.

[0482] In some embodiments, embodiments provided herein also include, but are not limited to:

1. A method of treating or preventing Type 1 diabetes comprising administering to a subject in need thereof, an anti-PD-1 agonist antibody linked to an anti-MAdCAM antibody, or antigen binding fragment thereof, wherein the anti-MAdCAM antibody, or antigen binding fragment thereof, comprises:
[0483] i) a heavy chain variable region comprising heavy chain CDR1, CDR2, and CDR3 sequences, wherein the heavy chain CDR1 sequence has an amino acid sequence having at least one amino acid substitution relative to SEQ ID NO: 1499; the heavy chain CDR2 has an amino acid sequence having at least one amino acid substitution relative to SEQ ID NO: 1506; and the heavy chain CDR3 has an amino acid sequence having at least one amino acid substitution relative to SEQ ID NOs: 1507, 1531, or 1532; and
[0484] (ii) a light chain variable region comprising light chain CDR1, CDR2, and CDR3 sequences, wherein the light chain CDR1 sequence has an amino acid sequence having at least one amino acid substitution relative to SEQ ID NO: 1502; the light chain CDR2 has an amino acid sequence having at least one amino acid substitution relative to SEQ ID NO: 1497; and the light chain CDR3 has an amino acid sequence having at least one amino acid substitution relative to SEQ ID NO: 1498.
   2. The method of embodiment 1, wherein the subject has Type 1 diabetes or is a subject at risk of developing Type 1 diabetes.
   3. The method of any one of embodiments 1 or 2, wherein the anti-MAdCAM antibody, or antigen binding fragment thereof, comprises:
[0485] i) a heavy chain variable region comprising heavy chain CDR1, CDR2, and CDR3 sequences, wherein the heavy chain CDR1 sequence has an amino acid sequence having one or zero amino acid substitution relative to SEQ ID NO: 1499; the heavy chain CDR2 has an amino acid sequence having one or zero amino acid substitution relative to SEQ ID NO: 1506; and the heavy chain CDR3 has an amino acid sequence having one or zero amino acid substitution relative to SEQ ID NOs: 1507, 1531, or 1532; and
[0486] (ii) a light chain variable region comprising light chain CDR1, CDR2, and CDR3 sequences, wherein the light chain CDR1 sequence has an amino acid sequence having one or zero amino acid substitution relative to SEQ ID NO: 1502; the light chain CDR2 has an amino acid sequence having one or zero amino acid substitution relative to SEQ ID NO: 1497; and the light chain CDR3 has an amino acid sequence having one or zero amino acid substitution relative to SEQ ID NO: 1498.
   4. The method of embodiment 1, wherein the anti-MAdCAM antibody, or antigen binding fragment thereof, heavy chain variable region comprises a heavy chain CDR1 comprising the amino acid sequence of SEQ ID NO: 1499, a heavy chain CDR2 comprising the amino acid sequence of SEQ ID NO: 1506, and a heavy chain CDR3 comprising the amino acid sequence of SEQ ID NO: 1507.
   5. The method of embodiment 1, wherein the anti-MAdCAM antibody, or antigen binding fragment thereof, heavy chain variable region comprises a heavy chain CDR1 comprising the amino acid sequence of SEQ ID NO: 1499, a heavy chain CDR2 comprising the amino acid sequence of SEQ ID NO: 1506, and a heavy chain CDR3 comprising the amino acid sequence of SEQ ID NO: 1531.
   6. The method of embodiment 1, wherein the anti-MAdCAM antibody, or antigen binding fragment thereof, heavy chain variable region comprises a heavy chain CDR1 comprising the amino acid sequence of SEQ ID NO: 1499, a heavy chain CDR2 comprising the amino acid sequence of SEQ ID NO: 1506, and a heavy chain CDR3 comprising the amino acid sequence of SEQ ID NO: 1532.
   7. The method of any one of embodiments 1-6, wherein the anti-MAdCAM antibody, or antigen binding fragment thereof, light chain variable region comprises a light chain CDR1 comprising the amino acid sequence of SEQ ID NO: 1502, a light chain CDR2 comprising the amino acid sequence of SEQ ID NO: 1497, and a light chain CDR3 comprising the amino acid sequence of SEQ ID NO: 1498.
   8. The method of embodiment 1, wherein the anti-MAdCAM antibody, or antigen binding fragment thereof, heavy chain variable region comprises an amino acid sequence having at least 90% identity to the amino acid sequence of SEQ ID NO: 1445, 1477, or 1480 and the anti-MAdCAM antibody light chain variable region comprises an amino acid sequence having at least 90% identity to the amino acid sequence of SEQ ID NO: 1367.
   9. The method of any one of embodiments 1-8, wherein the anti-MAdCAM antibody, or antigen binding fragment thereof, heavy chain variable region comprises an amino acid sequence of SEQ ID NOs: 1445, 1477, or 1480 and the anti-MAdCAM antibody light chain variable region comprises an amino acid of SEQ ID NO: 1367.
   10. The method of any one of embodiments 1-9, wherein the anti-MAdCAM antibody, or antigen binding fragment thereof, heavy chain variable region and the light chain variable region are in a Fab, or an scFv format.
   11. The method of any one of embodiments 1-10, wherein the anti-MAdCAM antibody, or antigen binding fragment thereof, heavy chain variable region and the light variable chain region are linked with a peptide linker.
   12. The method of embodiment 11, wherein the peptide linker is a glycine/serine linker.
   13. A method of treating Type 1 diabetes comprising administering to a subject in need thereof, an effector molecule linked to an antibody, or antigen binding fragment thereof, wherein the antibody comprises:
[0487] a light chain variable region comprising an amino acid sequence having at least 90% identity to an amino acid sequence selected from SEQ ID NOs: 592, 1360, 1361, 1362, 1363, 1364, 1365, 1366, 1367, 1368, 1369, 1370, 1371, 1372, 1373, 1374, 1375, 1376, 1380, 1381, 1382, 1383, 1384, 1385, 1386, 1464, 1465, 1466, 1467, or 1543; and
[0488] a heavy chain variable region comprising an amino acid sequence having at least 90% identity to an amino acid sequence selected from SEQ ID NOs: 591, 1346, 1347, 1348, 1349, 1350, 1351, 1352, 1353, 1354, 1355, 1356, 1357, 1358, 1377, 1378, 1379, 1387, 1388, 1389, 1390, 1391, 1392, 1393, 1394, 1395, 1396, 1397, 1398, 1439, 1440, 1441, 1442, 1443, 1444, 1445, 1450, 1451, 1452, 1453, 1454, 1455, 1456, 1457, 1458, 1459, 1460, 1461, 1462, 1463, 1469, 1470, 1471, 1472, 1473, 1474, 1475, 1477, 1480, 1542, 1544, or 1545.
   14. The method of embodiment 13, wherein the effector molecule is a PD-1 agonist.
   15. The method of embodiment 15, wherein the PD-1 agonist is an antibody that binds to PD-1.
   16. The method of embodiment 15, wherein the antibody that binds to PD-1 comprises:
[0489] i) a heavy chain variable region comprising heavy chain CDR1, CDR2, and CDR3 sequences, wherein the heavy chain CDR1 sequence has an amino acid sequence having at least one amino acid substitution relative to SEQ ID NO: 1481, or 1487; the heavy chain CDR2 has an amino acid sequence having at least one amino acid substitution relative to SEQ ID NO: 1482, or 1488; and the heavy chain CDR3 has an amino acid sequence having at least one amino acid substitution relative to SEQ ID NOs: 1483, or 1489; and
[0490] (ii) a light chain variable region comprising light chain CDR1, CDR2, and CDR3 sequences, wherein the light chain CDR1 sequence has an amino acid sequence having at least one amino acid substitution relative to SEQ ID NO: 1484, 1490, or 1214; the light chain CDR2 has an amino acid sequence having at least one amino acid substitution relative to SEQ ID NO: 1485, or 1491; and the light chain CDR3 has an amino acid sequence having at least one amino acid substitution relative to SEQ ID NO: 1486, or 1492.
   17. The method of embodiment 16, wherein the antibody that binds to PD-1 comprises:
[0491] a light chain variable region comprising an amino acid sequence having at least 90% identity to an amino acid sequence selected from SEQ ID NOs: 1359, 1449, or 1479; and
[0492] the variable heavy chain comprising an amino acid sequence having at least 90% identity to an amino acid sequence selected from SEQ ID NOs: 1438, 1446, 1447, 1448, 1476, or 1478.
   18. A method of delaying, reducing, treating, or preventing hyperglycemia comprising administering, to a subject in need thereof, a composition comprising an effector molecule linked to an anti-MAdCAM antibody, or antigen binding fragment thereof, and a pharmaceutically acceptable carrier.
   19. The method of embodiment 18, wherein the effector molecule is a PD-1 agonist.
   20. The method of embodiment 19, wherein the PD-1 agonist is an antibody that binds to PD-1.

[0493] 21. The method of any one of embodiments 18-20, where the subject has hyperglycemina, or is at risk of developing hyperglycemia.

22. The method of any one of embodiments 18-21, wherein the anti-MAdCAM antibody, or antigen binding fragment thereof, comprises:
[0494] i) a heavy chain variable region comprising heavy chain CDR1, CDR2, and CDR3 sequences, wherein the heavy chain CDR1 sequence has an amino acid sequence having at least one amino acid substitution relative to SEQ ID NO: 1499; the heavy chain CDR2 has an amino acid sequence having at least one amino acid substitution relative to SEQ ID NO: 1506; and the heavy chain CDR3 has an amino acid sequence having at least one amino acid substitution relative to SEQ ID NOs: 1507, 1531, or 1532; and
[0495] (ii) a light chain variable region comprising light chain CDR1, CDR2, and CDR3 sequences, wherein the light chain CDR1 sequence has an amino acid sequence having at least one amino acid substitution relative to SEQ ID NO: 1502; the light chain CDR2 has an amino acid sequence having at least one amino acid substitution relative to SEQ ID NO: 1497; and the light chain CDR3 has an amino acid sequence having at least one amino acid substitution relative to SEQ ID NO: 1498.
   23. The method of embodiment 22, wherein the anti-MAdCAM antibody, or antigen binding fragment thereof, comprises:
[0496] i) a heavy chain variable region comprising heavy chain CDR1, CDR2, and CDR3 sequences, wherein the heavy chain CDR1 sequence has an amino acid sequence having one or zero amino acid substitution relative to SEQ ID NO: 1499; the heavy chain CDR2 has an amino acid sequence having one or zero amino acid substitution relative to SEQ ID NO: 1506; and the heavy chain CDR3 has an amino acid sequence having one or zero amino acid substitution relative to SEQ ID NOs: 1507, 1531, or 1532, or variants of any of the foregoing; and
[0497] (ii) a light chain variable region comprising light chain CDR1, CDR2, and CDR3 sequences, wherein the light chain CDR1 sequence has an amino acid sequence having one or zero amino acid substitution relative to SEQ ID NO: 1502; the light chain CDR2 has an amino acid sequence having one or zero amino acid substitution relative to SEQ ID NO: 1497; and the light chain CDR3 has an amino acid sequence having one or zero amino acid substitution relative to SEQ ID NO: 1498, or variants of any of the foregoing.
   24. The method of embodiment 18, wherein the anti-MAdCAM antibody, or antigen binding fragment thereof, heavy chain variable region comprises a heavy chain CDR1 comprising an amino acid sequence of SEQ ID NO: 1499, a heavy chain CDR2 comprising an amino acid sequence of SEQ ID NO: 1506, and a heavy chain CDR3 comprising an amino acid sequence of SEQ ID NO: 1507.
   25. The method of embodiment 22, wherein the anti-MAdCAM antibody, or antigen binding fragment thereof, heavy chain variable region comprises a heavy chain CDR1 comprising an amino acid sequence of SEQ ID NO: 1499, a heavy chain CDR2 comprising an amino acid sequence of SEQ ID NO: 1506, and a heavy chain CDR3 comprising an amino acid sequence of SEQ ID NO: 1531.
   26. The method of embodiment 22, wherein the anti-MAdCAM antibody, or antigen binding fragment thereof, heavy chain variable region comprises a heavy chain CDR1 comprising an amino acid sequence of SEQ ID NO: 1499, a heavy chain CDR2 comprising an amino acid sequence of SEQ ID NO: 1506, and a heavy chain CDR3 comprising an amino acid sequence of SEQ ID NO: 1532.
   27. The method of any one of embodiments 22-26, wherein the anti-MAdCAM antibody, or antigen binding fragment thereof, light chain variable region comprises a light chain CDR1 comprising an amino acid sequence of SEQ ID NO: 1502, a light chain CDR2 comprising an amino acid sequence of SEQ ID NO: 1497, and a light chain CDR3 comprising an amino acid sequence of SEQ ID NO: 1498.
   28. The method of embodiment 22, wherein the anti-MAdCAM antibody, or antigen binding fragment thereof, heavy chain variable region comprises an amino acid sequence having at least 90% identity to the amino acid sequence of SEQ ID NO: 1445, 1477, or 1480 and the anti-MAdCAM antibody light chain variable region comprises an amino acid sequence having at least 90% identity to the amino acid sequence of SEQ ID NO: 1367.
   29. The method of embodiment 22, wherein the anti-MAdCAM antibody, or antigen binding fragment thereof, heavy chain variable region comprises an amino acid sequence of SEQ ID NOs: 1445, 1477, or 1480 and the anti-MAdCAM antibody light chain variable region comprises an amino acid of SEQ ID NO: 1367.
   30. The method of any one of embodiments 22-29, wherein the anti-MAdCAM antibody, or antigen binding fragment thereof, heavy chain variable region and the light chain variable region are in a Fab, or an scFv format.
   31. The method of any one of embodiments 18-30, wherein the effector molecule is an antibody, or antigen binding fragment thereof, that binds to PD-1, and wherein the antibody, or antigen binding fragment thereof, comprises:
[0498] i) a heavy chain variable region comprising heavy chain CDR1, CDR2, and CDR3 sequences, wherein the heavy chain CDR1 sequence has an amino acid sequence having at least one amino acid substitution relative to SEQ ID NO: 1481, or 1487; the heavy chain CDR2 has an amino acid sequence having at least one amino acid substitution relative to SEQ ID NO: 1482, or 1488; and the heavy chain CDR3 has an amino acid sequence having at least one amino acid substitution relative to SEQ ID NOs: 1483, or 1489; and
[0499] (ii) a light chain variable region comprising light chain CDR1, CDR2, and CDR3 sequences, wherein the light chain CDR1 sequence has an amino acid sequence having at least one amino acid substitution relative to SEQ ID NO: 1484, 1490, or 1214; the light chain CDR2 has an amino acid sequence having at least one amino acid substitution relative to SEQ ID NO: 1485, or 1491; and the light chain CDR3 has an amino acid sequence having at least one amino acid substitution relative to SEQ ID NO: 1486, or 1492.
   32. The method of any one of 19, wherein the anti-PD1 antibody comprises:
[0500] a light chain variable region comprising an amino acid sequence having at least 90% identity to an amino acid sequence selected from SEQ ID NOs: 1359, 1449, or 1479; and
[0501] a heavy chain variable region comprising an amino acid sequence having at least 90% identity to an amino acid sequence selected from SEQ ID NOs: 1438, 1446, 1447, 1448, 1476, or 1478.
   33. A method of treating Type 1 diabetes comprising administering to a subject in need thereof, a composition comprising an effector molecule linked to an antibody, or antigen binding fragment thereof, wherein:
[0502] a) the antibody is in an scFv orientation and comprises:
   [0503] i) a heavy chain variable region comprising heavy chain CDR1, CDR2, and CDR3 sequences, wherein the heavy chain CDR1 sequence has an amino acid sequence having one or zero amino acid substitution relative to SEQ ID NO: 1499; the heavy chain CDR2 has an amino acid sequence having one or zero amino acid substitution relative to SEQ ID NO: 1506; and the heavy chain CDR3 has an amino acid sequence having one or zero amino acid substitution relative to SEQ ID NOs: 1507, 1531, or 1532; and
   [0504] (ii) a light chain variable region comprising light chain CDR1, CDR2, and CDR3 sequences, wherein the light chain CDR1 sequence has an amino acid sequence having one or zero amino acid substitution relative to SEQ ID NO: 1502; the light chain CDR2 has an amino acid sequence having one or zero amino acid substitution relative to SEQ ID NO: 1497; and the light chain CDR3 has an amino acid sequence having one or zero amino acid substitution relative to SEQ ID NO: 1498; and
[0505] b) the effector molecule is in a Fab orientation and comprises:
   [0506] i) a heavy chain variable region comprising heavy chain CDR1, CDR2, and CDR3 sequences, wherein the heavy chain CDR1 sequence has an amino acid sequence having one or zero amino acid substitution relative to SEQ ID NO: 1481, or 1487; the heavy chain CDR2 has an amino acid sequence having one or zero amino acid substitution relative to SEQ ID NO: 1482, or 1488; and the heavy chain CDR3 has an amino acid sequence having one or zero amino acid substitution relative to SEQ ID NOs: 1483, or 1489; and
   [0507] (ii) a light chain variable region comprising light chain CDR1, CDR2, and CDR3 sequences, wherein the light chain CDR1 sequence has an amino acid sequence having one or zero amino acid substitution relative to SEQ ID NO: 1484, 1490, or 1214; the light chain CDR2 has an amino acid sequence having one or zero amino acid substitution relative to SEQ ID NO: 1485, or 1491; and the light chain CDR3 has an amino acid sequence having one or zero amino acid substitution relative to SEQ ID NO: 1486, or 1492.
      34. The method of embodiment 33, wherein:
[0508] a) the antibody is in an scFv orientation and comprises:
   [0509] i) a heavy chain variable region comprising heavy chain CDR1, CDR2, and CDR3 sequences, wherein the heavy chain CDR1 sequence has an amino acid sequence of SEQ ID NO: 1499; the heavy chain CDR2 has an amino acid sequence of SEQ ID NO: 1506; and the heavy chain CDR3 has an amino acid sequence of SEQ ID NOs: 1507, 1531, or 1532; and
   [0510] (ii) a light chain variable region comprising light chain CDR1, CDR2, and CDR3 sequences, wherein the light chain CDR1 sequence has an amino acid sequence of SEQ ID NO: 1502; the light chain CDR2 has an amino acid sequence of SEQ ID NO: 1497; and the light chain CDR3 has an amino acid sequence of SEQ ID NO: 1498; and
[0511] b) the effector molecule is in a Fab orientation and comprises:
   [0512] i) a heavy chain variable region comprising heavy chain CDR1, CDR2, and CDR3 sequences, wherein the heavy chain CDR1 sequence has an amino acid sequence of SEQ ID NO: 1481, or 1487; the heavy chain CDR2 has an amino acid sequence of SEQ ID NO: 1482, or 1488; and the heavy chain CDR3 has an amino acid sequence of SEQ ID NOs: 1483, or 1489; and
   [0513] (ii) a light chain variable region comprising light chain CDR1, CDR2, and CDR3 sequences, wherein the light chain CDR1 sequence has an amino acid sequence of SEQ ID NO: 1484, 1490, or 1214; the light chain CDR2 has an amino acid sequence of SEQ ID NO: 1485, or 1491; and the light chain CDR3 has an amino acid sequence of SEQ ID NO: 1486, or 1492.
      35. The method of any one of embodiments 33 or 34, wherein:
[0514] a) the antibody is in an scFv orientation and comprises:
   [0515] i) a heavy chain variable region comprising heavy chain CDR1, CDR2, and CDR3 sequences, wherein the heavy chain CDR1 sequence has the amino acid sequence of SEQ ID NO: 1499; the heavy chain CDR2 has the amino acid sequence of SEQ ID NO: 1506; and the heavy chain CDR3 has the amino acid sequence of SEQ ID NOs: 1507, or variants of any of the foregoing; and
   [0516] (ii) a light chain variable region comprising light chain CDR1, CDR2, and CDR3 sequences, wherein the light chain CDR1 sequence has the amino acid sequence of SEQ ID NO: 1502; the light chain CDR2 has the amino acid sequence of SEQ ID NO: 1497; and the light chain CDR3 has the amino acid sequence of SEQ ID NO: 1498, or variants of any of the foregoing; and
[0517] b) the effector molecule is in a Fab orientation and comprises:
   [0518] i) a heavy chain variable region comprising heavy chain CDR1, CDR2, and CDR3 sequences, wherein the heavy chain CDR1 sequence has the amino acid sequence of SEQ ID NO: 1487; the heavy chain CDR2 has the amino acid sequence of SEQ ID NO: 1488; and the heavy chain CDR3 has the amino acid sequence of SEQ ID NO: 1489, or variants of any of the foregoing; and
   [0519] (ii) a light chain variable region comprising light chain CDR1, CDR2, and CDR3 sequences, wherein the light chain CDR1 sequence has the amino acid sequence of SEQ ID NO: 1490; the light chain CDR2 has the amino acid sequence of SEQ ID NO: 1491; and the light chain CDR3 has the amino acid sequence of SEQ ID NO: 1492, or variants of any of the foregoing.
      36. The method of any one of embodiments 33 or 34, wherein:
[0520] a) the antibody is in an scFv orientation and comprises:
   [0521] i) a heavy chain variable region comprising heavy chain CDR1, CDR2, and CDR3 sequences, wherein the heavy chain CDR1 sequence has the amino acid sequence of SEQ ID NO: 1499; the heavy chain CDR2 has the amino acid sequence of SEQ ID NO: 1506; and the heavy chain CDR3 has the amino acid sequence of SEQ ID NOs: 1507, or variants of any of the foregoing; and
   [0522] (ii) a light chain variable region comprising light chain CDR1, CDR2, and CDR3 sequences, wherein the light chain CDR1 sequence has the amino acid sequence of SEQ ID NO: 1502; the light chain CDR2 has the amino acid sequence of SEQ ID NO: 1497; and the light chain CDR3 has the amino acid sequence of SEQ ID NO: 1498, or variants of any of the foregoing; and
[0523] b) the effector molecule is in a Fab orientation and comprises:
   [0524] i) a heavy chain variable region comprising heavy chain CDR1, CDR2, and CDR3 sequences, wherein the heavy chain CDR1 sequence has the amino acid sequence of SEQ ID NO: 1487; the heavy chain CDR2 has the amino acid sequence of SEQ ID NO: 1482; and the heavy chain CDR3 has the amino acid sequence of SEQ ID NO: 1483, or variants of any of the foregoing; and
   [0525] (ii) a light chain variable region comprising light chain CDR1, CDR2, and CDR3 sequences, wherein the light chain CDR1 sequence has the amino acid sequence of SEQ ID NO: 1484; the light chain CDR2 has the amino acid sequence of SEQ ID NO: 1485; and the light chain CDR3 has the amino acid sequence of SEQ ID NO: 1486, or variants of any of the foregoing.
      37. A method of treating Type 1 diabetes comprising administering to a subject in need thereof, an effector molecule linked to an antibody, or antigen binding fragment thereof, wherein:
[0526] a) the antibody is in an scFv orientation and comprises:
   [0527] a light chain variable region comprising an amino acid sequence having at least 95% identity to an amino acid sequence selected from SEQ ID NOs: 1367; and
   [0528] a heavy chain variable region comprising an amino acid sequence having at least 95% identity to an amino acid sequence selected from SEQ ID NOs: 1445; and
[0529] b) the effector molecule is in a Fab orientation and comprises:
   [0530] a light chain variable region comprising an amino acid sequence having at least 95% identity to an amino acid sequence selected from SEQ ID NOs: 1359, 1449, or 1479; and
   [0531] a heavy chain variable region comprising an amino acid sequence having at least 95% identity to an amino acid sequence selected from SEQ ID NOs: 1438, 1446, 1447, 1448, 1476, or 1478.
      38. The method of embodiment 37, wherein:
[0532] a) the antibody is in an scFv orientation and comprises:
   [0533] a light chain variable region comprising an amino acid sequence of SEQ ID NOs: 1367; and
   [0534] a heavy chain variable region comprising an amino acid sequence of SEQ ID NOs: 1445; and
[0535] b) the effector molecule is in a Fab orientation and comprises:
   [0536] a light chain variable region comprising an amino acid sequence of SEQ ID NOs: 1359, 1449, or 1479; and
   [0537] a heavy chain variable region comprising an amino acid sequence of SEQ ID NOs: 1438, 1446, 1447, 1448, 1476, or 1478.
      39. The method of any one of embodiments 37 or 38, wherein:
[0538] a) the antibody is in an scFv orientation and comprises:
   [0539] a light chain variable region comprising an amino acid sequence of SEQ ID NOs: 1367; and
   [0540] a heavy chain variable region comprising an amino acid sequence of SEQ ID NOs: 1445; and
[0541] b) the effector molecule is in a Fab orientation and comprises:
   [0542] a light chain variable region comprising an amino acid sequence of SEQ ID NOs: 1449; and
   [0543] a heavy chain variable region comprising an amino acid sequence of SEQ ID NOs: 1448.
      40. The method of any one of embodiments 37 or 38, wherein:
[0544] a) the antibody is in an scFv orientation and comprises:
   [0545] a light chain variable region comprising an amino acid sequence of SEQ ID NOs: 1367; and
   [0546] a heavy chain variable region comprising an amino acid sequence of SEQ ID NOs: 1445; and
[0547] b) the effector molecule is in a Fab orientation and comprises:
   [0548] a light chain variable region comprising an amino acid sequence of SEQ ID NOs: 1359; and
   [0549] a heavy chain variable region comprising an amino acid sequence of SEQ ID NOs: 1476.
      41. The method of any one of embodiments 37-40, wherein the heavy chain variable region and the light variable chain region are linked with a peptide linker.
      42. The method of embodiment 41, wherein the peptide linker is a glycine/serine linker.

[0550] The following examples are illustrative, but not limiting, of the compounds, compositions and methods described herein. Other suitable modifications and adaptations known to those skilled in the art are within the scope of the following embodiments.

### EXAMPLES

[0551] Non limiting examples of therapeutics, compounds, molecules, antibodies, compositions of matter, and examples may be found in PCT Application No. PCT/US2020/033707, which is hereby incorporated by reference in its entirety.

### Example 1. MAdCAM Molecule Variants With Disrupted Poly Y Patch Do Not Show Non Specific Binding to DNA and Insulin

[0552] Non-specific DNA and Insulin binding is predictive of poor pharmacokinetics (PK). An immunosorbent plate was coated with dsDNA at a concentration of 1 μg/mL or Insulin at 5 μg/mL in PBS pH 7.4, 75 μl/well, and incubated overnight at 4° C. Wells were washed with PBS pH 7.4 containing 0.05% Tween-20 (wash buffer) three times, and then blocked with 200 μl/well 1% BSA in PBS pH 7.4 (block buffer) for two hours at room temperature. After three washes with wash buffer, test antibodies (TAs) and controls Lenzilumab (humanized monoclonal antibody that binds to target colony stimulating factor 2/granulocyte-macrophage colony stimulating factor) and Elotuzumab (a humanized IgG1 monoclonal antibody that binds to SLAMF7 on NK cells) were diluted to 100 nM in PBS containing 1% BSA and 0.05% Tween-20 (assay buffer). The diluted material was added to the DNA/insulin coated plate at 75 μl/well for 1 hour at room temperature. After three washes with wash buffer, a donkey anti-human FcY HRP conjugated polyclonal antibody, diluted to 1:5000 in assay buffer, was added to the plate at 75 μl/well for 1 hr at room temperature. After three washes with wash buffer and three washes with wash buffer (with no tween-20), the assay was developed with 3,3′, 5,5′-Tetramethylbenzidine (TMB), and stopped with 1N HCL. OD 450 nm was measured. The experiment included appropriate controls for non-specific binding of test articles to the plate/block in the absence of DNA or insulin. PRNT1 showed dsDNA polyreactivity score of 45.64, and Insulin polyreactivity score of 6.21; MIAB128 showed dsDNA polyreactivity score of 33.01, and Insulin polyreactivity score of 2.62; MIAB129 showed dsDNA polyreactivity score of 3.51, and Insulin polyreactivity score of 2.43; MIAB130 showed dsDNA polyreactivity score of 29.66, and Insulin polyreactivity score of 3.26; MIAB131 showed dsDNA polyreactivity score of 13.49, and Insulin polyreactivity score of 8.00; MIAB133 showed dsDNA polyreactivity score of 44.80, and Insulin polyreactivity score of 13.16; MIAB134 showed dsDNA polyreactivity score of 45.96, and Insulin polyreactivity score of 25.53; MIAB136 showed dsDNA polyreactivity score of 51.85, and Insulin polyreactivity score of 75.37; MIAB137 showed dsDNA polyreactivity score of 43.44, and Insulin polyreactivity score of 67.33; MIAB139 showed dsDNA polyreactivity score of 1.09, and Insulin polyreactivity score of 2.08; MIAB141 showed dsDNA polyreactivity score of 33.26, and Insulin polyreactivity score of 4.18; MIAB144 showed dsDNA polyreactivity score of 47.18, and Insulin polyreactivity score of 5.07; Elotuzumab control showed dsDNA polyreactivity score of 1, and Insulin polyreactivity score of 1; and Lenzilumab control showed dsDNA polyreactivity score of 52.42, and Insulin polyreactivity score of 1.52. No non-specific binding to DNA and insulin was seen with MIAB129, MIAB139, and MIAB141. MIAB129, MIAB139, and MIAB141 were not polyreactive.

### Example 2. MAdCAM Molecule Variants with the A34N Substitution in LCDR1 do not Show Non-Specific Binding to DNA and Insulin

[0553] Non-specific DNA and Insulin binding is predictive of poor pharmacokinetics (PK). An immunosorbent plate was coated with dsDNA at a concentration of 1 μg/mL or Insulin at 5 μg/mL in PBS pH 7.4, 75 μl/well, and incubated overnight at 4° C. Wells were washed with PBS pH 7.4 containing 0.05% Tween-20 (wash buffer) three times, and then blocked with 200 μl/well 1% BSA in PBS pH 7.4 (block buffer) for two hours at room temperature. After three washes with wash buffer, TAs and controls Lenzilumab and Elotuzumab were diluted to 100 nM in PBS containing 1% BSA and 0.05% Tween-20 (assay buffer). The diluted material was added to the DNA/insulin coated plate at 75 μl/well for 1 hour at room temperature. After three washes with wash buffer, a donkey anti-human FcY HRP conjugated polyclonal antibody, diluted to 1:5000 in assay buffer, was added to the plate at 75 μl/well for 1 hr at room temperature. After three washes with wash buffer and three washes with wash buffer (with no tween-20), the assay was developed with TMB, and stopped with 1N HCL. OD 450 nm was measured. The experiment included appropriate controls for non-specific binding of test articles to the plate/block in the absence of DNA or insulin. MIAB145 showed dsDNA polyreactivity score of 43.11, and Insulin polyreactivity score of 4.58; MIAB146 showed dsDNA polyreactivity score of 24.57, and Insulin polyreactivity score of 2.61; MIAB147 showed dsDNA polyreactivity score of 8.36, and Insulin polyreactivity score of 3.81; MIAB148 showed dsDNA polyreactivity score of 3.53, and Insulin polyreactivity score of 3.63; MIAB149 showed dsDNA polyreactivity score of 27.86, and Insulin polyreactivity score of 3.53; MIAB150 showed dsDNA polyreactivity score of 9.66, and Insulin polyreactivity score of 3.74; MIAB151 showed dsDNA polyreactivity score of 2.89, and Insulin polyreactivity score of 3.63; MIAB152 showed dsDNA polyreactivity score of 7.01, and Insulin polyreactivity score of 2.83; MIAB153 showed dsDNA polyreactivity score of 1.52, and Insulin polyreactivity score of 2.46; MIAB154 showed dsDNA polyreactivity score of 8.25, and Insulin polyreactivity score of 61.91; MIAB155 showed dsDNA polyreactivity score of 1.62, and Insulin polyreactivity score of 1.99; MIAB156 showed dsDNA polyreactivity score of 4.70, and Insulin polyreactivity score of 45.25; MIAB157 showed dsDNA polyreactivity score of 6.63, and Insulin polyreactivity score of 3.99; MIAB158 showed dsDNA polyreactivity score of 1.67, and Insulin polyreactivity score of 2.67; PRNT1 showed dsDNA polyreactivity score of 38.82, and Insulin polyreactivity score of 5.02; MIAB141 showed dsDNA polyreactivity score of 1.77, and Insulin polyreactivity score of 3.60; Elotuzumab control showed dsDNA polyreactivity score of 0.95, and Insulin polyreactivity score of 1.01; and Lenzilumab control showed dsDNA polyreactivity score of 38.04, and Insulin polyreactivity score of 7.87. No non-specific binding to DNA and insulin was seen with MIAB148, MIAB151, MIAB153, MIAB155, MIAB158 and MIAB141. MIAB148, MIAB151, MIAB153, MIAB155, MIAB158 and MIAB141 were not polyreactive.

### Example 3. MAdCAM Molecule Variants With the A34N Substitution in LCDR1 Bind Human MAdCAM

[0554] Anti-human Fc biosensors were equilibrated in assay buffer (1% BSA in 1×PBS with 0.05% Tween-20) for 10 minutes before the experiment was set-up. Test articles were diluted to 5 ug/mL in assay buffer and 200 uL pipetted to 96 well plate. Human MAdCAM was titrated down, two-fold dilutions (starting at 600 nM as the highest concentration, 7-point dilution). The experiment was run using data acquisition software version 10.0 for OCTET96 RED. Test articles were captured using anti-human Fc biosensors for 180 s. Biosensors loaded with test articles were then equilibrated in assay buffer for 120 s. Association was performed in wells with huMAdCAM for 180 seconds. Dissociation was performed in wells with assay buffer for 180 s. Kinetic parameters (kon and kdis) and dissociation constant (KD) were calculated from a 1:1 global fit model using the data analysis software of the Octet96 RED software version 10. MIAB148 showed Kd (M) of 2.69E-06, Kon (1/ms) of 1.17E+05, and Kdis (1/s) of 3.14E-01; MIAB151 showed Kd of 2.96E-06, Kon of 9.87E+04, and Kdis of 2.92E-01; MIAB153 showed Kd of 8.36E-06, Kon of 6.48E+04, and Kdis of 5.43E-01; and PRNT1 showed Kd of 1.84E-08, Kon of 5.83E+05, and Kdis of 1.07E-02. MIAB148, MIAB151, and MIAB153 bound human MAdCAM with lower affinity than the parent PRNT1 molecule.

### Example 4. MAdCAM Molecule Variants With Y105I or Y105W and A34N Mutations in the VH Do Not Show Non-Specific Binding to DNA and Insulin

[0555] Non-specific DNA and Insulin binding is predictive of poor pharmacokinetics (PK). An immunosorbent plate was coated with dsDNA at a concentration of 1 μg/mL or Insulin at 5 μg/mL in PBS pH 7.4, 75 μl/well, and incubated overnight at 4° C. Wells were washed with PBS pH 7.4 containing 0.05% Tween-20 (wash buffer) three times, and then blocked with 200 μl/well 1% BSA in PBS pH 7.4 (block buffer) for two hours at room temperature. After three washes with wash buffer, TAs and controls Lenzilumab and Elotuzumab were diluted to 100 nM in PBS containing 1% BSA and 0.05% Tween-20 (assay buffer). The diluted material was added to the DNA/insulin coated plate at 75 μl/well for 1 hour at room temperature. After three washes with wash buffer, a donkey anti-human FcY HRP conjugated polyclonal antibody, diluted to 1:5000 in assay buffer, was added to the plate at 75 μl/well for 1 hr at room temperature. After three washes with wash buffer and three washes with wash buffer (with no tween-20), the assay was developed with TMB, and stopped with 1N HCL. OD 450 nm was measured. The experiment included appropriate controls for non-specific binding of test articles to the plate/block in the absence of DNA or insulin. MIAB159 showed dsDNA polyreactivity score of 9.58, and Insulin polyreactivity score of 4.66; MIAB160 showed dsDNA polyreactivity score of 42.95, and Insulin polyreactivity score of 17.80; MIAB161 showed dsDNA polyreactivity score of 25.87, and Insulin polyreactivity score of 5.00; MIAB162 showed dsDNA polyreactivity score of 21.75, and Insulin polyreactivity score of 5.31; MIAB163 showed dsDNA polyreactivity score of 28.56, and Insulin polyreactivity score of 18.53; MIAB164 showed dsDNA polyreactivity score of 25.46, and Insulin polyreactivity score of 7.07; MIAB165 showed dsDNA polyreactivity score of 19.42, and Insulin polyreactivity score of 9.53; MIAB166 showed dsDNA polyreactivity score of 37.98, and Insulin polyreactivity score of 7.89; MIAB167 showed dsDNA polyreactivity score of 26.28, and Insulin polyreactivity score of 29.56; MIAB168 showed dsDNA polyreactivity score of 7.75, and Insulin polyreactivity score of 8.35; MIAB169 showed dsDNA polyreactivity score of 3.34, and Insulin polyreactivity score of 5.59; MIAB170 showed dsDNA polyreactivity score of 2.05, and Insulin polyreactivity score of 4.73; MIAB172 showed dsDNA polyreactivity score of 26.63, and Insulin polyreactivity score of 3.79; MIAB173 showed dsDNA polyreactivity score of 29.82, and Insulin polyreactivity score of 7.10; PRNT1 showed dsDNA polyreactivity score of 34.37, and Insulin polyreactivity score of 6.91; Elotuzumab control showed dsDNA polyreactivity score of 1.05, and Insulin polyreactivity score of 1.25; and Lenzilumab control showed dsDNA polyreactivity score of 44.96, and Insulin polyreactivity score of 21.31. No non-specific binding to DNA and insulin was seen with MIAB169 and MIAB170. MIAB169 and MIAB170 were not polyreactive.

### Example 5. MAdCAM Molecule Variants With the Y105I Substitution Bind Human MAdCAM

[0556] Anti-human Fc biosensors were equilibrated in assay buffer (1% BSA in 1×PBS with 0.05% Tween-20) for 10 minutes before the experiment was set-up. Test articles were diluted to 5 ug/mL in assay buffer and 200 uL pipetted to 96 well plate. Human MAdCAM was titrated down, two-fold dilutions (starting at 600 nM as the highest concentration, 7-point dilution). Experiment was run using data acquisition software version 10.0 for OCTET96 RED. Test articles were captured using anti-human Fc biosensors for 180 s. Biosensors loaded with test articles were then equilibrated in assay buffer for 120 s. Association was performed in wells with huMAdCAM for 180 seconds. Dissociation was performed in wells with assay buffer for 180 s. Kinetic parameters (kon and kdis) and dissociation constant (KD) were calculated from a 1:1 global fit model using the data analysis software of the Octet96 RED software version 10. PRNT1 showed Kd (nM) of 26.6, Kon (1/ms) of 4.16E+05, and Kdis (1/s) of 1.11E-02; MIAB169 showed Kd of 266, Kon of 2.78E+05, and Kdis of 7.38E-02; and MIAB170 showed no binding at 1 μM human MAdCAM tested. MIAB169 bound to human MAdCAM at 10 fold lower affinity than parent PRNT1.

### Example 6. MAdCAM Molecule Variants With the Y105I Substitution Bind Human and Cyno MAdCAM

[0557] Anti-human Fc biosensors were equilibrated in assay buffer (1% BSA in 1×PBS with 0.05% Tween-20) for 10 minutes before the experiment was set-up. Test articles were diluted to 5 ug/mL in assay buffer and 200 uL pipetted to 96 well plate. Human MAdCAM was titrated down, two-fold dilutions (starting at 600 nM as the highest concentration, 7-point dilution). Experiment was run using data acquisition software version 10.0 for OCTET96 RED. Test articles were captured using anti-human Fc biosensors for 180 s. Biosensors loaded with test articles were then equilibrated in assay buffer for 120 s. Association was performed in wells with huMAdCAM for 180 seconds. Dissociation was performed in wells with assay buffer for 180 s. Kinetic parameters (kon and kdis) and dissociation constant (KD) were calculated from a 1:1 global fit model using the data analysis software of the Octet96 RED software version 10. PRNT1 showed Kd (nM) of 24 in human, Kd of 13 in cyno, and biphasic Kd in mouse; MIAB169 showed Kd of 340 in human, Kd of 153 in cyno, and biphasic Kd in mouse. MIAB169 showed lower affinity to human and cyno MAdCAM than parent PRNT1.

### Example 7. MAdCAM Molecule Variants with the Y105I Mutation do not Show Non Specific Binding to DNA and Insulin Irrespective of Expression Host

[0558] An immunosorbent plate was coated with dsDNA at a concentration of 1 μg/mL or Insulin at 5 μg/mL in PBS pH 7.4, 75 μl/well, and incubated overnight at 4° C. Wells were washed with PBS pH 7.4 containing 0.05% Tween-20 (wash buffer) three times, and then blocked with 200 μl/well 1% BSA in PBS pH 7.4 (block buffer) for two hours at room temperature. After three washes with wash buffer, TAs and controls Lenzilumab and Elotuzumab were diluted to 100 nM in PBS containing 1% BSA and 0.05% Tween-20 (assay buffer). The diluted material was added to the DNA/insulin coated plate at 75 μl/well for 1 hour at room temperature. After three washes with wash buffer, a donkey anti-human FcY HRP conjugated polyclonal antibody, diluted to 1:5000 in assay buffer, was added to the plate at 75 μl/well for 1 hr at room temperature. After three washes with wash buffer and three washes with wash buffer (with no tween-20), the assay was developed with TMB, and stopped with 1N HCL. OD 450 nm was measured. The experiment included appropriate controls for non-specific binding of test articles to the plate/block in the absence of DNA or insulin. MIAB169-CHO showed dsDNA polyreactivity score of 1.65, and Insulin polyreactivity score of 3.38; MIAB169-HEK showed dsDNA polyreactivity score of 3.36, and Insulin polyreactivity score of 6.37; Elotuzumab control showed dsDNA polyreactivity score of 1.16, and Insulin polyreactivity score of 3.43; and Lenzilumab control showed dsDNA polyreactivity score of 49.51, and Insulin polyreactivity score of 69.23. No non-specific binding to DNA and insulin was seen with MIAB169 expressed in CHO or HEK cells.

### Example 8. MAdCAM Germlined Mutants Bind Human MAdCAM

[0559] Anti-human Fc biosensors were equilibrated in assay buffer (1% BSA in 1×PBS with 0.05% Tween-20) for 10 minutes before the experiment was set-up. Test articles were diluted to 5 ug/mL in assay buffer and 200 uL pipetted to 96 well plate. Human MAdCAM was titrated down, two-fold dilutions (starting at 600 nM as the highest concentration, 7-point dilution). Experiment was run using data acquisition software version 10.0 for OCTET96 RED. Test articles were captured using anti-human Fc biosensors for 180 s. Biosensors loaded with test articles were then equilibrated in assay buffer for 120 s. Association was performed in wells with huMAdCAM for 180 seconds. Dissociation was performed in wells with assay buffer for 180 s. Kinetic parameters (kon and kdis) and dissociation constant (KD) were calculated from a 1:1 global fit model using the data analysis software of the Octet96 RED software version 10. PRNT1 showed Kd (nM) of 14, Kon (1/ms) of 6.83E+05, and Kdis (1/s) of 9.55E-03; MIAB137 (HCDR2 germlined) showed Kd (nM) of 203, Kon (1/ms) of 4.04E+05, and Kdis (1/s) of 8.2E-02; MIAB136 (HCDR1 germlined), MIAB141 (LCDR1 germlined), and MIAB141 (LCDR3 germlined) showed no binding to 150 nM human MAdCAM. MIAB137 showed a reduced binding affinity to human MAdCAM compared to parental molecule, PRNT1.

[0560] In a separate experiment PRNT1 showed Kd (nM) of 26.5, Kon (1/ms) of 4.29E+05, and Kdis (1/s) of 1.14E-02; MIAB145-001 (VK: V29I) showed Kd (nM) of 22.2, Kon (1/ms) of 4.05E+05, and Kdis (1/s) of 8.97E-03; MIAB146-001 (VK: R31S) showed Kd (nM) of 43.8, Kon (1/ms) of 4.49E+05, and Kdis (1/s) of 1.97E-02; MIAB149-001 (VK: V29I) showed Kd (nM) of 68.8, Kon (1/ms) of 3.76E+05, and Kdis (1/s) of 2.59E-02; and MIAB147-001 (VK: S32Y) showed no binding to 200 nM human MAdCAM. MIAB146 and MIAB149 have reduced binding affinity to human MAdCAM, compared to parental molecule, PRNT1.

[0561] In another experiment PRNT1 showed Kd (nM) of 21.2, Kon (1/ms) of 3.85E+05, and Kdis (1/s) of 8.16E-03; MIAB133-001 (VH: D31S) showed Kd (nM) of 20.00, Kon (1/ms) of 5.64E+05, and Kdis (1/s) of 1.13E-02; MIAB174-001 (VH: HCDR1: F32Y) showed Kd (nM) of 21.8, Kon (1/ms) of 4.45E+05, and Kdis (1/s) of 9.69E-03; MIAB175-001 (VH: HCDR1: D31S, F32Y) showed Kd (nM) of 22.6, Kon (1/ms) of 4.71E+05, and Kdis (1/s) of 1.06E-02; MIAB177-001 (VH: HCDR2: I48V, Y50A, D54S, S55G, Y57S, N59Y) showed Kd (nM) of 218, Kon (1/ms) of 3.91E+05, and Kdis (1/s) of 8.51E-02; and MIAB178-001 (VH: HCDR1: D31S, F32Y; HCDR2: Y50A, D54S, Y57S, N59Y) showed Kd (nM) of 519, Kon (1/ms) of 3.72E+05, and Kdis (1/s) of 2.20E-01. MIAB177 and MIAB178 have reduced affinity to MAdCAM compared to parental molecule, PRNT1.

[0562] In another experiment PRNT1 showed Kd (nM) of 14.8, Kon (1/ms) of 3.96E+05, and Kdis (1/s) of 5.86E-03; MIAB182-001 (HCDR1: D31S, F32Y; HCDR2: I48V, Y50A, D54S, S55G, Y57S, N59Y; VK: V29I) showed Kd (nM) of 119, Kon (1/ms) of 2.26E+05, and Kdis (1/s) of 2.67E-02; MIAB183-001 (HCDR1: D31S, F32Y; HCDR2: I48V, Y50A, D54S, S55G, Y57S, N59Y; VK: R31S) showed Kd (nM) of 362, Kon (1/ms) of 1.66E+05, and Kdis (1/s) of 5.99E-02; MIAB184-001 (HCDR1: D31S, F32T; HCDR2: I48V, Y50A, D54S, S55G, Y57S, N59Y; VK: V29I, R31S) showed Kd (nM) of 563, Kon (1/ms) of 1.45E+05, and Kdis (1/s) of 8.18E-02. Germlining heavy chain with V29I reduced MAdCAM affinity by 10-fold, germlining heavy chain with R31S reduced MAdCAM affinity by 20-fold, and germlining heavy chain and light chain reduced MAdCAM affinity by 40-fold.

### Example 9. MAdCAM-IL2 Molecules with the MAdCAM Y105I Mutation and IL-2 T3A Mutation do not Show Non-Specific Binding to DNA and Insulin Irrespective of Expression Host

[0563] An immunosorbent plate was coated with dsDNA at a concentration of 1 μg/mL or Insulin at 5 μg/mL in PBS pH 7.4, 75 μl/well, and incubated overnight at 4° C. Wells were washed with PBS pH 7.4 containing 0.05% Tween-20 (wash buffer) three times, and then blocked with 200 μl/well 1% BSA in PBS pH 7.4 (block buffer) for two hours at room temperature. After three washes with wash buffer, TAs and controls Lenzilumab and Elotuzumab were diluted to 100 nM in PBS containing 1% BSA and 0.05% Tween-20 (assay buffer). The diluted material was added to the DNA/insulin coated plate at 75 μl/well for 1 hour at room temperature. After three washes with wash buffer, a donkey anti-human FcY HRP conjugated polyclonal antibody, diluted to 1:5000 in assay buffer, was added to the plate at 75 μl/well for 1 hr at room temperature. After three washes with wash buffer and three washes with wash buffer (with no tween-20), the assay was developed with TMB, and stopped with 1N HCL. OD 450 nm was measured. The experiment included appropriate controls for non-specific binding of test articles to the plate/block in the absence of DNA or insulin. MIAB198-CHO showed dsDNA polyreactivity score of 1.36, and Insulin polyreactivity score of 3.19; MIAB198-HEK showed dsDNA polyreactivity score of 2.02, and Insulin polyreactivity score of 3.63; Elotuzumab control showed dsDNA polyreactivity score of 1.16, and Insulin polyreactivity score of 3.43; and Lenzilumab control showed dsDNA polyreactivity score of 49.51, and Insulin polyreactivity score of 69.22. No non-specific binding to DNA and insulin was seen with MIAB198 expressed in CHO or HEK cells.

### Example 10. MAdCAM-IL2 Molecules with the MAdCAM Y105I Mutation, IL-2 T3A Mutation, and Light Chain V29I Germline Mutation do not Show Non-Specific Binding to DNA and Insulin and are Expression Host Dependent

[0564] An immunosorbent plate was coated with dsDNA at a concentration of 1 μg/mL or Insulin at 5 μg/mL in PBS pH 7.4, 75 μl/well, and incubated overnight at 4° C. Wells were washed with PBS pH 7.4 containing 0.05% Tween-20 (wash buffer) three times, and then blocked with 200 μl/well 1% BSA in PBS pH 7.4 (block buffer) for two hours at room temperature. After three washes with wash buffer, TAs and controls Lenzilumab and Elotuzumab were diluted to 100 nM in PBS containing 1% BSA and 0.05% Tween-20 (assay buffer). The diluted material was added to the DNA/insulin coated plate at 75 μl/well for 1 hour at room temperature. After three washes with wash buffer, a donkey anti-human FcY HRP conjugated polyclonal antibody, diluted to 1:5000 in assay buffer, was added to the plate at 75 μl/well for 1 hr at room temperature. After three washes with wash buffer and three washes with wash buffer (with no tween-20), the assay was developed with TMB, and stopped with 1N HCL. OD 450 nm was measured. The experiment included appropriate controls for non-specific binding of test articles to the plate/block in the absence of DNA or insulin. PRNT1-CHO showed dsDNA polyreactivity score of 20.59, and Insulin polyreactivity score of 7.07; PRNT1-HEK showed dsDNA polyreactivity score of 28.08, and Insulin polyreactivity score of 13.16; MIAB185-CHO showed dsDNA polyreactivity score of 3.43, and Insulin polyreactivity score of 5.07; MIAB185-HEK showed dsDNA polyreactivity score of 23.11, and Insulin polyreactivity score of 38.37; MIAB188-CHO showed dsDNA polyreactivity score of 1.41, and Insulin polyreactivity score of 4.20; MIAB188-HEK showed dsDNA polyreactivity score of 32.80, and Insulin polyreactivity score of 83.29; Elotuzumab control showed dsDNA polyreactivity score of 0.92, and Insulin polyreactivity score of 1.09; and Lenzilumab control showed dsDNA polyreactivity score of 24.07, and Insulin polyreactivity score of 7.93. No non-specific binding to DNA and insulin was seen with MIAB185 and MIAB188 expressed in CHO cells.

### Example 11. MIAB197 is Stable for 1 Month at 4° C. and 37° C.

[0565] MIAB197 in acetate buffer was concentrated to 5 mg/mL using spin columns. Samples were collected at various concentrations and analyzed by size exclusion chromatography on an Agilent BioAdvance SEC 300 A column. MIAB197 at 5 mg/mL was incubated at 4° C. and 37° C. for up to 28 days to analyze molecule's stability over time. Samples were collected at various time points and analyzed by size exclusion chromatography on an Agilent BioAdvance SEC 300 A column. No concentration dependent aggregation was observed with MIAB197 when concentrated up to 5 mg/mL in optimized acetate buffer as seen by analytical SEC. MIAB197 at concentration of 5 mg/mL remained stable with no loss of main peak or appearance of high or low molecular weight species at 4° C. and 37° C. for 1 month.

### Example 12. MIAB197 has Favorable Thermal Stability

[0566] The PD-1-MAdCAM antibodies were submitted to the Nano DSC system (TA Instrument) for analysis. A temperature ramp of 1° C./min was performed with monitoring from 25° C. to 100° C. Thermograms of the blank buffer were subtracted from each antibody prior to analysis and the Tm values were calculated after deconvolution using the Nano DSC software. PRNT1 showed Tm (C) peak 1 of 64.5, peak 2 of 81.7, and peak 3 of 83.8; MIAB197 showed Tm peak 1 of 69.8, peak 2 of 81.7, and peak 3 of 84. MIAB197 has favorable thermal stability.

### Example 13. MIAB197 has Desirable Characteristics for Development

[0567] To characterize the identity and purity of the PD-1-MAdCAM antibodies, the antibodies were prepared in reducing labeling buffer before being submitted to the LabChip GXII system (PerkinElmer). rCE SDS revealed PRNT1 to comprise 26.5% light chain and 71.6% heavy chain; and MIAB197 to comprise 28.47% light chain and 71.53% heavy chain. MIAB197 has good characteristics for development.

### Example 14. MIAB197 has Isoelectric Point Compatible with Manufacturing

[0568] The PD-1-MAdCAM antibodies were diluted in a matrix of methyl cellulose, 4 M urea, 3-10 pharmalytes (4%), 5 mM Arginine, and pI markers (indicated below). The mixture was submitted to an iCE3 IEF Analyzer (ProteinSimple) and pre-focused at 1,500 V followed by focusing at 3,000 V. The isoelectric points of each peak were calculated from the bracketing pI markers. Capillary isoelectric focusing (cIEF) showed isoelectric peaks of 7.72 with peak area (%) of 0.60, 7.82 with peak area of 1.94, 7.96 with peak area of 5.98, 8.11 with peak area of 10.52, 8.24 with peak area of 32.43, 8.33 with peak area of 22.95, 8.39 with peak area of 12.56, 8.44 with peak area of 5.21, and 8.54 with peak area of 7.81 for PRNT1; and isoelectric peaks of 8.55 with peak area (%) of 3.63, 8.60 with peak area of 8.66, 8.69 with peak area of 18.38, 8.72 with peak area of 28.79, and 8.76 with peak area of 40.54 for MIAB197. The data demonstrate that the isoelectric peaks for MIAB197 were all above pH 8.5, with ˜70% at pI of 8.7 which is favorable for manufacturability

### Example 15. MIAB204 does not Show Non Specific Binding to DNA and Insulin

[0569] Non-specific DNA and Insulin binding is predictive of poor pharmacokinetics (PK). An immunosorbent plate was coated with dsDNA at a concentration of 1 μg/mL or Insulin at 5 μg/mL in PBS pH 7.4, 75 μl/well, and incubated overnight at 4° C. Wells were washed with PBS pH 7.4 containing 0.05% Tween-20 (wash buffer) three times, and then blocked with 200 μl/well 1% BSA in PBS pH 7.4 (block buffer) for two hours at room temperature. After three washes with wash buffer, TAs and controls Lenzilumab and Elotuzumab were diluted to 100 nM in PBS containing 1% BSA and 0.05% Tween-20 (assay buffer). The diluted material was added to the DNA/insulin coated plate at 75 μl/well for 1 hour at room temperature. After three washes with wash buffer, a donkey anti-human FcY HRP conjugated polyclonal antibody, diluted to 1:5000 in assay buffer, was added to the plate at 75 μl/well for 1 hr at room temperature. After three washes with wash buffer and three washes with wash buffer (with no tween-20), the assay was developed with TMB, and stopped with 1N HCL. OD 450 nm was measured. The experiment included appropriate controls for non-specific binding of test articles to the plate/block in the absence of DNA or insulin. MIAB204 showed dsDNA polyreactivity score of 1.66, and Insulin polyreactivity score of 8.43; Elotuzumab control showed dsDNA polyreactivity score of 1.16, and Insulin polyreactivity score of 3.43; and Lenzilumab control showed dsDNA polyreactivity score of 49.51, and Insulin polyreactivity score of 69.23. MIAB204 is not polyreactive.

### Example 16. MIAB204 has Favorable Thermal Stability

[0570] The PD-1-MAdCAM antibodies were submitted to the Nano DSC system (TA Instrument) for analysis. A temperature ramp of 1° C./min was performed with monitoring from 25° C. to 100° C. Thermograms of the blank buffer were subtracted from each antibody prior to analysis and the Tm values were calculated after deconvolution using the Nano DSC software. PRNT1 showed Tm (C) peak 1 of 64.5, peak 2 of 81.7, and peak 3 of 83.8; MIAB204 showed Tm peak 1 of 65.4, peak 2 of 69.5, and peak 3 of 84.4. MIAB204 has favorable thermal stability.

### Example 17. MIAB204 has Desirable Characteristics for Development

[0571] To characterize the identity and purity of the PD-1-MAdCAM antibodies, the antibodies were prepared in reducing labeling buffer before being submitted to the LabChip GXII system (PerkinElmer). rCE SDS revealed PRNT1 to comprise 26.5% light chain and 71.6% heavy chain; and MIAB204 to comprise one peak comprising 80.64% and second peak comprising 19.36% of the sample. MIAB204 showed different O-glycan occupancies. MIAB204 showed sufficient purity and composition identity for development.

### Example 18. MIAB204 has Isoelectric Point Compatible with Manufacturing

[0572] The sample was diluted in a matrix of methyl cellulose, 4 M urea, 3-10 pharmalytes (4%), 5 mM Arginine, and pI markers (indicated below). The mixture was submitted to an iCE3 IEF Analyzer (ProteinSimple) and pre-focused at 1,500 V followed by focusing at 3,000 V. The isoelectric points of each peak were calculated from the bracketing pI markers. Capillary isoelectric focusing (cIEF) showed isoelectric peaks of 7.72 with peak area (%) of 0.60, 7.82 with peak area of 1.94, 7.96 with peak area of 5.98, 8.11 with peak area of 10.52, 8.24 with peak area of 32.43, 8.33 with peak area of 22.95, 8.39 with peak areak of 12.56, 8.44 with peak area of 5.21, and 8.54 with peak area of 7.81 for PRNT1; and isoelectric peaks of 7.59 with peak area (%) of 2.92, 7.84 with peak area of 5.94, 8.00 with peak area of 14.88, 8.19 with peak area of 18.64, 8.29 with peak area of 5.80, 8.33 with peak area of 10.73, 8.38 with peak area of 22.13, 8.43 with peak area of 14.04, and 8.48 with peak area of 4.92 for MIAB204. Isoelectric peaks for MIAB204 show heterogeneity with most peaks having the pI greater than 8. MIAB204 is considered good for manufacturing.

### Example 19. MAdCAM-IL-2M Molecules do not Block the Interaction Between

[0573] Recombinant Human MAdCAM and alpha4beta7-positive Hut-78 T cells. 96 well plates were coated with 2.5 ug/mL recombinant human MAdCAM-Fc in PBS overnight at 4 C. Plated were blocked with DMEM containing 20% FBS for 30 minutes at 37° C., and MIAB210 (control), PRNT1, MIAB197, and a control molecule were captured for 1 hour at 37° C. in PBS. Hut-78 cells were incubated in 20% FBS DMEM supplemented with 1 mM MnCl2 for 1 hour at 37° C., and the cells were added to plates for 1 hour at 37° C. Plated were washed with PBS supplemented with 1 mM MnCl2 3 times, followed by 100 uL of cell titer glo. Plates were shaken for 2 minutes, and incubated at room temperature for another 10 minutes. Luminescence was measured and revealed lack of inhibition of MAdCAM and alpha4beta7 interaction. Optimized MAdCAM-IL-2M bi-specifics do not block MAdCAM-alpha4beta7 interaction in vitro and therefore should not interfere with the trafficking of alpha4beta7-positive T cells in vivo.

### Example 20. MAdCAM-IL-2M Molecules Selectively Induce P-STAT5 Phosphorylation on Primary Tregs Versus Teff or NK Cells when Tethered to Human/Mouse MAdCAM Expressing CHO Cells

[0574] Parental CHO cells or CHO cells over-expressing human MAdCAM or murine MAdCAM were seeded onto wells of a 96 well plate (Corning) overnight. After washing 3 times with F12+10% FBS media, the plate was blocked for 1 hour with 5 uM whole human IgG. 10 nM parental MAdCAM-IL-2M bi-specifics PRNT1 or optimized variants MIAB204 and MIAB197 were captured for 1 hour. After washing 2 times with F12+10% FBS media, freshly-isolated human PBMCs were stimulated for 60 minutes with captured IL-2MM bispecifics. Cells were then fixed for 10 minutes with BD Cytofix, permeabilized sequentially with BD Perm III, and BioLegend FOXP3 permeabilization buffer, blocked with human serum and stained for 30 minutes with antibodies against phospho-STAT5 A488, CD25 PE, FOXP3 AF647 and CD4 PerCP Cy5.5, CD3 BV421, CD56 BV785 and acquired on an Attune NXT with plate loader. PRNT1, MIAB204, and MIAB197 showed P-STAT5-positive Tregs. Accordingly, PRNT1, MIAB204, and MIAB197 selectively activate Tregs. PRNT1, MIAB204, and MIAB197 selectively induced P-STAT5 phosphorylation on primary Tregs versus Teff or NK cells when tethered to human/mouse MAdCAM expressing CHO cells.

### Example 21. V69A and Q74P Substitutions in the IL-2 Mutein are Beneficial in Improving Solubility of the Molecule

[0575] The pTT5 vectors containing the full length IgG1 heavy with C-terminally fused human IL-2 mutant and light chain encoding MIAB211 (control IgG1 mAb) were co-transfected at equimolar ratios into HEK cells. After 5-7 days, cell culture supernatants expressing MIAB211 (control IgG1 mAb) were harvested, and clarified by centrifugation and filtration through a 0.22 μm filtration device. MIAB211, was captured on Mab Select column. The column was washed with PBS pH 7.4 and the captured protein was eluted using 0.1M glycine pH 2.5, with neutralization using a tenth volume of 1M Tris pH 8.0. The protein was buffer exchanged into PBS pH 7.4, and analyzed by size exclusion chromatography on an Agilent BioAdvance SEC 300 A column. MIAB211 (control IgG1 mAb) was aggregated with only 67% monodispersed after ProA purification as shown by size exclusion chromatography. Additional polishing procedures like cation exchange improved the monodispersity to 86% which is not suitable for assays. V69A and Q74P are beneficial in improving solubility of molecule.

### Example 22. PD-1-MAdCAM Molecules With Heavy Chain Mutations Bind Human MAdCAM

[0576] Anti-human IgG Fc (AHC) biosensors were equilibrated in assay buffer for 20 minutes. Test article was diluted to 10 μg/mL in assay buffer. A seven-point two-fold serial dilution of human MAdCAM-1 was prepared in assay buffer, starting at 300 nM down to 4.69 nM. Test article was loaded on tips for 240 s followed by a 120 s association phase with MAdCAM and 120 s dissociation phase in assay buffer. Kinetic parameters (Kon and Koff) and dissociation constant (Kd) were calculated from a 1:1 global fit model using the data analysis software of the Octet96 RED software version 10. Parental molecule showed Kd (nM) of 62.8, Kon (1/ms) of 5.81E+05, and Koff (1/s) of 3.65E−02; PMAB19 showed Kd of 31.2, Kon of 5.40E+05, and Koff of 1.68E−02; PMAB20 showed Kd of 90.5, Kon of 4.11E+05, and Koff of 3.72E−02; PMAB23 showed Kd of 110, Kon of 3.55E+05, and Koff of 3.89E−02; PMAB24 showed Kd of 33.2, Kon of 4.04E+05, and Koff of 1.34E−02; PMAB25 showed Kd of 43.6, Kon of 4.86E+05, and Koff of 2.12E−02; PMAB26 showed Kd of 138, Kon of 4.76E+05, and Koff of 6.58E−02; PMAB27 showed Kd of 92.2, Kon of 138E+06, and Koff of 1.28E−01; PMAB28 showed Kd of 86.2, Kon of 1.05E+06, and Koff of 9.02E−02; and PMAB21 and PMAB22 showed no binding. PMAB19, PMAB20, PMAB23, PMAB24, PMAB25, PMAB26, PMAB27, and PMAB28 comprising heavy chain mutations bind to human MAdCAM.

### Example 23. PD-1-MAdCAM Molecules with Light Chain Mutations Bind Human MAdCAM

[0577] Anti-human IgG Fc (AHC) biosensors were equilibrated in assay buffer for 20 minutes. Test article was diluted to 10 μg/mL in assay buffer. A seven-point serial dilution of human MAdCAM-1 was prepared in assay buffer, starting at 200 nM down to 3.13 nM. Test article was loaded on tips for 240 s followed by a 120 s association phase with MAdCAM and 120 s dissociation phase in assay buffer. Kinetic parameters (Kon and Koff) and dissociation constant (Kd) were calculated from a 1:1 global fit model using the data analysis software of the Octet96 RED software version 10. Parental molecule showed Kd (nM) of 135, Kon (1/ms) of 2.52E+05, and Koff (1/s) of 3.41E−02; PMAB36 showed Kd of 109, Kon of 2.98E+05, and Koff of 3.25E-02; PMAB37 showed Kd of 285, Kon of 2.94E+05, and Koff of 8.38E−02; PMAB41 showed Kd of 43.5 uM, Kon of 2.12E+03, and Koff of 9.25E−02; PMAB42 showed Kd of 395, Kon of 2.88E+05, and Koff of 1.14E−01; and PMAB38, PMAB39, PMAB40, and PMAB43 showed no binding. PMAB36, PMAB37, PMAB41, and PMAB42 comprising light chain mutations bind to human MAdCAM.

### Example 24. PD-1-MAdCAM Molecules With Germline Mutations Bind Human MAdCAM

[0578] Anti-human IgG Fc (AHC) biosensors were equilibrated in assay buffer for 20 minutes. Test article was diluted to 10 μg/mL in assay buffer. A seven-point serial dilution of human MAdCAM-1 was prepared in assay buffer, starting at 200 nM down to 3.13 nM. Test article was loaded on tips for 240 s followed by a 120 s association phase with MAdCAM and 120 s dissociation phase in assay buffer. Kinetic parameters (Kon and Kdis) and dissociation constant (Kd) were calculated from a 1:1 global fit model using the data analysis software of the Octet96 RED software version 10. Parental molecule showed Kd (M) of 1.15E−07, Kon (1/ms) of 3.06E+05, and Kdis (1/s) of 3.51E−02; PMAB13 showed Kd of 1.32E−07, Kon of 5.42E+05, and Kdis of 7.17E−02; PMAB12 showed Kd of 6.33E−08, Kon of 7.33E+05, and Kdis of 4.64E−02; PMAB11 showed Kd of 4.66E−07, Kon of 4.19E+05, and Kdis of 1.95E−01; PMAB10 showed Kd of 1.46E−07, Kon of 6.62E+05, and Kdis of 9.67E−02; PMAB9 showed Kd of 1.59E−07, Kon of 4.55E+05, and Kdis of 7.25E−02; PMAB8 showed Kd of 7.14E−08, Kon of 6.56E+05, and Kdis of 4.69E−02; PMAB7 showed Kd of 2.36E−07, Kon of 5.76E+05, and Kdis of 1.36E−01; PMAB6 showed Kd of 1.50E−07, Kon of 6.98E+05, and Kdis of 1.05E−01; PMAB5 showed Kd of 4.13E−07, Kon of 2.90E+05, and Kdis of 1.20E−01; PMAB4 showed Kd of 4.18E−08, Kon of 1.31E+06, and Kdis of 5.47E−02; PMAB3 showed Kd of 3.33E−07, Kon of 7.17E+05, and Kdis of 2.39E−01; and PMAB2 showed Kd of 1.75E−07, Kon of 7.25E+05, and Kdis of 1.27E−01. PD-1-MAdCAM Molecules comprising germline mutations bind to human MAdCAM.

### Example 25. PD-1-MAdCAM Molecules with Single Mutations Bind Mouse MAdCAM

[0579] Anti-human IgG Fc (AHC) biosensors were equilibrated in assay buffer for 20 minutes. Test article was diluted to 10 μg/mL in assay buffer. A seven-point serial dilution of mouse MAdCAM-1 was prepared in assay buffer, starting at 500 nM down to 7.82 nM. Test article was loaded on tips for 180 s followed by a 120 s association phase with MAdCAM and 150 s dissociation phase in assay buffer. Kinetic parameters (Kon and Kdis) and dissociation constant (Kd) were calculated from a 1:1 global fit model using the data analysis software of the Octet96 RED software version 10. Parental molecule showed Kd (M) of 1.38E−07, Kon (1/ms) of 1.48E+05, Kdis (1/s) of 2.04E−02, and response of 0.1387; PMAB19 showed Kd of 1.12E−07, Kon of 1.58E+05, Kdis of 1.77E−02, and response of 0.1494; PMAB20 showed Kd of 1.18E−07, Kon of 1.63E+05, Kdis of 1.93E−02, and response of 0.1531; PMAB23 showed Kd of 1.41E−07, Kon of 1.26E+05, Kdis of 1.78E−02, and response of 0.1406; PMAB24 showed Kd of 5.24E−08, Kon of 1.14E+05, Kdis of 5.96E−03, and response of 0.0549; PMAB25 showed Kd of 1.15E−07, Kon of 1.05E+05, Kdis of 1.20E−02, and response of 0.1328; PMAB26 showed Kd of 1.34E−07, Kon of 8.79E+04, Kdis of 1.18E−02, and response of 0.132; PMAB27 showed Kd of 1.02E−06, Kon of 4.58E+03, Kdis of 4.69E−03, and response of 0.0278; PMAB28 showed Kd of 1.03E−07, Kon of 8.59E+04, Kdis of 8.86E−03, and response of 0.083; PMAB36 showed Kd of 2.06E−07, Kon of 1.22E+05, Kdis of 2.51E−02, and response of 0.1689; PMAB37 showed Kd of 1.76E−07, Kon of 1.01E+05, Kdis of 1.78E−02, and response of 0.1518; PMAB41 showed Kd of 1.19E−07, Kon of 2.08E+05, Kdis of 2.46E−02, and response of 0.1887; and PMAB42 showed Kd of 1.05E−07, Kon of 1.62E+05, Kdis of 1.70E−02, and response of 0.1287. PD-1-MAdCAM Molecules comprising single mutations bind to mouse MAdCAM.

### Example 26. PD-1-MAdCAM Molecules with Single Hydrophobic Patch Mutations Bind Human MAdCAM

[0580] Anti-human IgG Fc (AHC) biosensors were equilibrated in assay buffer for 20 minutes. Test article was diluted to 10 μg/mL in assay buffer. A seven-point serial dilution of human MAdCAM-1 was prepared in assay buffer, starting at 200 nM down to 3.13 nM. Test article was loaded on tips for 240 s followed by a 120 s association phase with MAdCAM and 120 s dissociation phase in assay buffer. Kinetic parameters (Kon and Koff) and dissociation constant (Kd) were calculated from a 1:1 global fit model using the data analysis software of the Octet96 RED software version 10. Parental molecule showed Kd (nM) of 116, Kon (1/ms) of 2.38E+05, and Koff (1/s) of 2.76E−02; PMAB45 showed Kd of 735 uM, Kon of 5.91E+02, and Koff of 4.34E−01; PMAB46 showed Kd of 37.9 uM, Kon of 8.16E+03, and Koff of 3.09E−01; PMAB47 showed Kd of 219, Kon of 3.29E+05, and Koff of 7.20E−02; PMAB48 showed Kd of 51 uM, Kon of 9.33E+03, and Koff of 1.33E−01; PMAB49 showed Kd of 142, Kon of 8.79E+04, and Koff of 1.25E−02; PMAB51 showed Kd of 93.5, Kon of 1.15E+05, and Koff of 9.52E−03; and PMAB44 and PMAB50 showed no binding. PMAB45, PMAB46, PMAB47, PMAB48, PMAB49, and PMAB51 comprising single hydrophobic patch mutations bind to human MAdCAM.

### Example 27. Optimized PD-1-MAdCAM Molecules Bind Human and Mouse MAdCAM

[0581] Kinetic parameters (Kon and Koff) and dissociation constant (Kd) were assessed and calculated as described above. Binding kinetics to human MAdCAM of the parental molecule showed Kd (M) of 3.76E−08 with a Kd error of 3.76E−08, Kon (1/ms) of 1.06E+06 with a Kon error of 3.32E+04, Kdis (1/s) of 3.98E−02 with a Kdis error of 1.36E−03, and response of 0.0839; PMAB15 showed Kd of 7.31E−08 with a Kd error of 3.82E−09, Kon of 1.15E+06 with a Kon error of 4.99E+04, Kdis of 8.39E−02 with a Kdis error of 2.42E−03, and response of 0.0655; PMAB16 showed Kd of 1.34E−07 with Kd error of 4.18E−09, Kon of 4.72E+05 with a Kon error of 1.26E+04, Kdis of 6.31E−02 with a Kdis error of 1.03E−03, and response of 0.1856; and PMAB17 showed Kd of 1.71E−08 with Kd error of 1.02E−09, Kon of 3.73E+06 with a Kon error of 1.72E+05, Kdis of 6.36E−02 with a Kdis error of 2.42E−03, and response of 0.0416. Binding kinetics to mouse MAdCAM of the parental molecule showed Kd (M) of 1.24E−07 with a Kd error of 5.96E−09, Kon (1/ms) of 3.74E+05 with a Kon error of 1.35E+04, Kdis (1/s) of 4.63E−02 with a Kdis error of 1.49E−03, and response of 0.256; PMAB15 binding was inconclusive; PMAB16 showed Kd of 3.34E−07 with Kd error of 1.34E−08, Kon of 2.48E+05 with a Kon error of 8.63E+03, Kdis of 8.28E−02 with a Kdis error of 1.64E−03, and response of 0.0407; and PMAB17 binding was inconclusive. PMAB15, PMAB16, and PMAB17 bind to human MAdCAM, and PMAB16 binds to mouse MAdCAM. While the combination of germline mutations in PMAB15 and PMAB17 have the appropriate affinity for human MAdCAM, the binding to mouse MAdCAM is severely compromised.

### Example 28. Optimized PD-1-MAdCAM Molecules Bind Human, Cyno, and Mouse MAdCAM

[0582] Kinetic parameters (Kon and Koff) and dissociation constant (Kd) were assessed and calculated as described above. Binding kinetics to human MAdCAM of PMAB57 showed Kd (M) of 1.22E−07 with a Kd error of 7.08E−09, Kon (1/ms) of 3.20E+05 with a Kon error of 1.77E+04, Kdis (1/s) of 3.89E−02 with a Kdis error of 6.84E−04, and response of 0.1804; PMAB18 showed Kd of 1.98E−07 with a Kd error of 1.23E−08, Kon of 2.59E+05 with a Kon error of 1.54E+04, Kdis of 5.11E−02 with a Kdis error of 9.93E−04, and response of 0.1842. Binding kinetics to cyno MAdCAM of PMAB57 showed Kd (M) of 4.99E−08 with a Kd error of 8.00E−10, Kon (1/ms) of 3.06E+05 with a Kon error of 4.74E+03, Kdis (1/s) of 1.53E−02 with a Kdis error of 6.39E−05, and response of 0.169; PMAB18 showed Kd of 2.26E−08 with a Kd error of 5.51E−10, Kon of 4.53E+05 with a Kon error of 1.07E+04, Kdis of 1.02E−02 with a Kdis error of 6.08E−05, and response of 0.1447. Binding kinetics to mouse MAdCAM of PMAB57 showed Kd (M) of 2.05E−07 with a Kd error of 4.09E−10, Kon (1/ms) of 2.72E+05 with a Kon error of 5.63E+03, and Kdis (1/s) of 5.58E−02 with a Kdis error of 5.43E−04; PMAB18 showed Kd of 2.01E−07 with a Kd error of 4.41E−10, Kon of 3.86E+05 with a Kon error of 1.01E+04, and Kdis of 7.76E−02 with a Kdis error of 8.45E−04. Optimized PD-1-MAdCAM antibody affinity for MAdCAM matches the targets across human, cyno, and mouse MAdCAM.

### Example 29. Optimized PD-1-MAdCAM Molecules Bind Human, Cyno, and Mouse MAdCAM Regardless of the PD-1 Agonist

[0583] Kinetic parameters (Kon and Koff) and dissociation constant (Kd) were assessed and calculated as described above. Binding kinetics to human MAdCAM of PMAB58 showed Kd of 1.35E−07, Kon of 7.12E+04, and Kdis of 9.61E−03; PMAB53 showed Kd of 4.97E−08, Kon of 1.44E+04, and Kdis of 7.16E−04; PMAB56 showed Kd of 2.08E−07, Kon of 2.36E+04, and Kdis of 4.91E−03; PMAB59 showed Kd of 1.40E−07, Kon of 3.83E+04, and Kdis of 5.37E−03; PMAB54 showed Kd of 5.92E−07, Kon of 2.36E+05, and Kdis of 1.40E−01; and PMAB55 showed Kd of 4.76E−08, Kon of 3.43E+04, and Kdis of 1.63E−03. Binding kinetics to cyno MAdCAM of PMAB58 showed Kd of 9.13E−09, Kon of 2.29E+05, and Kdis of 2.09E−03; PMAB53 showed Kd of 3.79E−07, Kon of 5.71E+04, and Kdis of 2.17E−02; PMAB56 showed Kd of 9.65E−08, Kon of 6.12E+05, and Kdis of 5.91E−02; PMAB59 showed Kd of 1.66E−08, Kon of 1.09E+05, and Kdis of 1.82E−03; PMAB54 showed Kd of 1.58E−07, Kon of 7.19E+04, and Kdis of 1.14E−02; and PMAB55 showed Kd of 4.43E−08, Kon of 2.09E+05, and Kdis 9.24E-03. Binding kinetics to mouse MAdCAM of PMAB58 showed Kd of 3.30E−07, Kon of 2.51E+05, and Kdis 8.25E−02; PMAB53 showed Kd of 1.74E−06, Kon of 1.25E+05, and Kdis of 2.17E−01; PMAB56 showed Kd of 1.61E−07, Kon of 9.12E+03, and Kdis of 1.47E−03; PMAB59 showed Kd of 1.31E−07, Kon of 1.30E+04, and Kdis of 1.70E−03; PMAB54 showed Kd of 2.48E−07, Kon of 5.57E+03, and Kdis of 1.38E−03; and PMAB55 showed Kd of 5.95E−08, Kon of 2.20E+04, and Kdis of 1.31E−03. Optimized PD-1-MAdCAM antibodies bind human, cyno, and mouse MAdCAM regardless of the PD-1 agonist, but strongly favor M to L mutants such as PMAB56 and PMAB55.

### Example 30. Optimized PD-1-MAdCAM Molecules are Thermally Stable

[0584] Thermal stability of PMAB58, PMAB53, PMAB56, PMAB59, PMAB54, and PMAB55 was evaluated as described above. The data showed that the onset of melting temperature for the M to L mutants, such as PMAB56 and PMAB55, was very similar to their respective parental clones. The M to I mutants, such as PMAB53 and PMAB54, had a higher Tm than the parental and M to L mutant, however the difference in Tm is not significant. The T aggregation onset was measured at 493 nm and produced similar values for PMAB58, PMAB53, and PMAB56; and PMAB59, PMAB54, and PMAB55. Overall, there was no significant difference in the temperature of aggregation onset. Freeze thaw stability was slightly better for the M to L mutants when compared to the initial POI, and the aSEC data showed that the initial peak heights were lower for the M to L mutants in comparison to the parental clone. Accordingly, the optimized PD-1-MAdCAM molecules are thermally stable.

### Example 31. Y105D Mutation Decreases Polyreactive Binding to Insulin

[0585] Plates were coated overnight with dsDNA and human insulin in 1×PBS. Plates were blocked with 1×PBS with 1% BSA. Antibody binding was tested at 100 nM. Sample signal was normalized to the background signal (coated wells with 2° antibody only). The data showed good dsDNA polyreactivity scores for all samples except the Y105K mutant and negative control antibody; and good Insulin polyreactivity scores for all samples except the Y105K mutant and the negative control antibody. The Y105D mutant showed improved lower Insulin polyreativity scores than other mutants. Polyreactive binding of the Y103G, Y105D, and Y105K mutants to dsDNA and human insulin shows that the Y105D hydrophobic patch mutation decreases polyreactive binding to human insulin compared to the parental antibody

### Example 32. PMAB16 has Decreased Polyreactive Binding to BVP or HEK Cell Lysate

[0586] Plates were coated with 1% Baculovirus particle (BVP) or HEK293 cell lysate (HCL) in carbonate buffer pH 9.5, 4° C. overnight. Plates were blocked with 1×PBS with 2% BSA. Antibodies were tested in triplicate for binding to BVP or HCL at 150, 50, 16.7 and 5.6 μg/mL. Signal was normalized to background signal (coated wells with 2° antibody only). BVP and HCL polyreactivity scores were lower for the PMAB16 antibody as compared to parental PMAB1 when used at 50 ug/mL or 16.7 ug/mL concentrations. Accordingly, the optimized PMAB16 antibody has decreased polyreactivity to BVP or HCL compared to the parent clone.

### Example 33. PMAB16 has Decreased Isoelectric Point

[0587] The sample was diluted in a matrix of methyl cellulose, 4 M urea, 3-10 pharmalytes (4%), 5 mM Arginine, and pI markers (indicated below). The mixture was submitted to an iCE3 IEF Analyzer (ProteinSimple) and pre-focused at 1,500 V followed by focusing at 3,000 V. The isoelectric points of each peak were calculated from the bracketing pI markers. Capillary isoelectric focusing (cIEF) showed isoelectric peaks of 8.71 with peak area (%) of 5.75, 8.97 with peak area of 19.20, 9.03 with peak area of 10.63, 9.09 with peak area of 16.92, and 9.13 with peak area of 47.50 for the PMAB1 antibody; and isoelectric peaks of 8.50 with peak area (%) of 3.90, 8.58 with peak area of 6.36, 8.73 with peak area of 45.74, and 8.76 with peak area of 44.00 for PMAB16. All isoelectric peaks for PMAB16 show the pI greater than 8. PMAB16 is considered good for manufacturing.

### Example 34. PMAB16 has Decreased Concentration Dependent Aggregation

[0588] Antibodies were affinity purified and buffer exchanged into phosphate buffer, pH 7.0 containing 8.5% sucrose and 100 mM NaCl. Each antibody was then concentrated using a centrifugal concentrator with samples taken at the indicated concentrations for analysis by analytical SEC. The optimized MAdCAM clone PMAB16 showed a decrease in concentration dependent aggregation compared to the parental PMAB1 antibody sequence.

### Example 35. PMAB16 has Good Storage Stability

[0589] Antibodies were concentrated using a centrifugal concentrator to a final concentration of 1 mg/mL. Samples were flash frozen at the indicated time points and aggregation was measured by analytical SEC. The optimized MAdCAM antibody PMAB16 showed good storage stability over 28 days at 4° C. PMAB16 stored in the accelerated stress condition of 37° C. also showed good stability out to 21 days. Accordingly, PMAB16 has good storage stability.

### Example 36. PMAB16 has Favorable Thermal Stability

[0590] The samples were submitted to the Nano DSC system (TA Instrument) for analysis. A temperature ramp of 1° C./min was performed with monitoring from 25° C. to 100° C. as described above. The data showed the Tm of PMAB16 to be lower than that of the parental molecule PMAB1, and improved storage stability at 4° C. and temperature dependent aggregation.

### Example 37. Identity of PMAB16 was Verified Via Mass Spectroscopy and CE-SDS

[0591] Sample was denatured and reduced by guanidine and DTT and deglycosylated by PNGase F before SEC separation and mass spectrometry. Mass spectroscopy showed two peaks for the PMAB16 sample, with values of 75542 Da for the peak 1 and 24258 for the peak 2, consisted with the expected mass.

[0592] Sample was prepared in reducing labeling buffer before electrophoresis using the LabChip GXII system. The data showed three peaks with fluorescence values of 26.85% for peak 1, 0.76% for peak 2, and 72.39% for peak 3, consistent with expected chain compositions for PMAB16.

### Example 38. Optimized MAdCAM Clones Retain Binding Specificity

[0593] Parental CHO cells or CHO cells expressing MAdCAM-1 were incubated with the indicated test articles. Bound test articles were detected by addition of a fluorescently conjugated anti-human IgG antibody. Optimized MAdCAM clones (PMAB18, PMAB59 and PMAB58) showed similar binding to the parental molecule (PMAB57).

### Example 39. PMAB18 Showed Improved Tethered Activity in Jurkat Assay

[0594] MAdCAM-expressing CHO cells were allowed to adhere and form a monolayer. Test articles were added at the indicated concentrations and allowed to bind for 1 h at 37° C. All wells were washed, and PD-1 reporter Jurkat cells were added. Jurkat cells were incubated with test article loaded CHO cells for 2 h at 37° C. PMAB18 showed improved tethered PD-1 agonist activity as compared to the parent antibody.

### Example 40. Optimized PD-1-MAdCAM Antibodies Co-Localize with MAdCAM-1

[0595] Fresh frozen mesenteric lymph node replicates from a 12-week BALB/c mouse were sectioned at 5 μm, fixed with acetone, blocked with blockade buffer solution for ten minutes room temperature and incubated with 1 and 10 nM titrations of test articles overnight at 4-degree Celsius. Tissues were then stained with anti-mouse MAdCAM and anti-human IgG Fc for two hours room temperature, DAPI counterstained and mounted and imaged with confocal microscopy. Clones including optimized MAdCAM (PMAB58 and PMAB18) co-localized with MAdCAM-1 expressing structures similarly to the parental clones (PMAB1 and PMAB57).

### Example 41. PMAB58 Prolongs Survival in Xenogeneic Graft Versus Host Disease

[0596] Xenogeneic graft versus host disease was induced by the transfer of human PBMC into immunodeficient mice. Beginning 10 days after cell transfer, mice were treated subcutaneously weekly with PMAB1, PMAB58, or vehicle. PMAB58 improved probability of survival to over 80 days, while the median survival time for PMAB1 was 49 days, and 41 days for vehicle. Accordingly, PMAB58 improves survival time in GVHD.

### Example 42. PMAB18 Downregulates Chemokines/Cytokines in Small Intestine

[0597] Immunocompromised NSG mice were engrafted with human PBMCs 10 days prior to treatment. Mice were treated weekly with MADCAM-PD1 bispecific (3 mg/kg) for three weeks and sacrificed. Small intestine was homogenized, normalized for total protein concentration and cytokines/chemokines were measured using the O-link proteomic platform. Data represent geometric mean and geometric standard deviation of 8 animals (log 2 scale). A student's t-test was performed on all markers; CLC4, p=0.005; IL17A, p=0.04; CXCL10, p=0.06; IFNG, p=0.03. (NPX, normalized protein expression) The vehicle data showed geoMean values of 257.9 for CCL4, 4.4 for IL17A, 14.1 for CXCL10, and 8812 for IFNG; while PMAB18 showed geoMean values of 43.8 for CCL4, 2.1 for IL17A, 3.9 for CXCL10, and 1899 for IFNG. PMAB18 reduces CCL4, IL17A, CXCL10 and IFNG in small intestine tissue from Xenogeneic graft-versus-host-disease mice. In conclusion, reduced pro-inflammatory cytokine and chemokines in target tissue suggest therapeutic effect of the MADCAM-PD1 agonist bispecific.

### Example 43. PMAB18 and PMAB58 are Detectable in Gut Tissue Through 4 Weeks Post DC Dosing

[0598] Balb/c mice were SC dosed with 1 mg/kg of PMAB18 or PMAB58. Intact PMAB18 and PMAB58 was detected in gut tissue 4 weeks after subcutaneous administration into Balb/c mice (1 mg/kg dose), revealing desirable extended PK in tissues. PMAB18 and PMAB58 remained intact and exhibited good drug like properties in systemic circulation as shown in FIGS. 20A and 20B.

### Example 44. Anti-PD-1-MAdCAM Bispecific Molecules for the Treatment of Type 1 Diabetes

[0599] Using a phage display library human/mouse/cyno cross reactive antibodies, specific for PD-1 or MAdCAM, were isolated. PD-1 antibodies were screened for their ability to antagonize or agonize the PD-1 pathway. A single triple-species cross reactive clone that was specifically agonistic with no evidence of antagonism was identified and incorporated into the final bifunctional antibody. Similarly, a triple species cross reactive non-blocking anti-MAdCAM antibody was identified using a multi-tiered screening approach. These two antibodies were combined to generate an IgG-scFv fusion with the IgG component comprising the anti-PD1 moiety comprising and the scFv moiety comprising the anti-MAdCAM moiety. NOD mice at various ages (10-16 weeks) were treated IV or SC with the anti-PD-1-MAdCAM bispecific molecule or vehicle alone. At multiple time points post treatment tissues (MLN, PLN, Pancreas) were harvested to assess for in vivo localization of test article by probing with anti-human IgG antibody specific for the F_{c} portion of the bifunctional antibody. At multiple time points post treatment cells were isolated from lymph nodes or spleen by mechanical dissociation or from the pancreas by intraductal injection of collagenase IV solution. Isolated cells were stained with a cocktail of antibodies to assess expression of the following markers; CD3, CD4, CD8, Live Dead, CD44, PD-1, Tim3 and IGRP-tet. For efficacy studies 6 week-old mice were treated once with a 500 ug bolus of anti-PD-L1 antibody (10F.9G2, an anti-PD1 antibody) and 250 ug every two days after. Test article was administered at day 0 and day 7 via sub-cutaneous injection.

[0600] Starting at 13 weeks of age bifunctional antibody could be detected concurrently with MAdCAM expressing structures in the mesenteric lymph node, pancreatic lymph node and pancreas after a single subcutaneous injection. Treatment with the anti-PD-1-MAdCAM bispecific molecule was able to specifically induce Tim3 on IGRP-tet+ cells which peaked at 4 days post treatment and was undetectable after 7 days. Additionally, the anti-PD-1-MAdCAM bispecific molecule treatment led to a significant reduction of PD-1 on bulk CD8 T cells as well as on IGRP-tet+ cells. In an accelerated PD-L1 blockade mediated model of NOD hyperglycemia simultaneous administration of the anti-PD-1-MAdCAM bispecific molecule with PD-L1 blocking antibody resulted in significantly delayed induction of hyperglycemia compared to blockade alone. Accordingly, the anti-PD-1-MAdCAM bispecific molecule modulates antigen specific and bulk CD8 T cells in pre-hyperglycemic NOD mice and is able to delay PD-L1 blockade accelerated insulitis/hyperglycemia in NOD mice.

### Example 45. Discovery of Anti-PD-1 and Anti-MAdCAM Molecules

[0601] Antibodies specific for MAdCAM-1 or PD-1 were screened for binding to human cynomolgus monkey and mouse MAdCAM-1 or PD-1. Antibodies were also tested for their ability to interfere with MAdCAM-1/α4β7 integrin binding (C) or PD-1/PD-L1 binding (D). Triple species non-blocking clones were selected for further development. Data showed multiple clones capable of binding to human cynomolgus monkey and mouse MAdCAM-1 or PD-1.

### Example 46. Discovery of PD-1 Agonist Molecules

[0602] A library of anti-PD-1 antibodies was screened for their ability to interfere with PD-L1/PD-1 signaling and their ability to activate PD-1 signaling when immobilized. Agonist antibodies that were not antagonists were selected for further development. Data showed several clones that did not interfere with endogenous PD-1/PD-L1 interactions in vitro, but activated PD-1 signaling when tethered to a surface in vitro. Molecules capable of inducing PD-1 agonist response were selected for further development.

### Example 47. Anti-PD-1-MAdCAM Bispecific Molecule Localizes to MAdCAM Expressing Structures in NOD Mice

[0603] Thirteen week old female NOD mice were subcutaneously dosed with a 3 mg/kg dose of the anti-PD-1-MAdCAM bispecific molecule. Twenty four hours after treatment the mesenteric lymph node, pancreatic lymph node, and pancreas were harvested, and flash frozen in OCT. 5 uM sections were dual stained with anti-MAdCAM (MECA367, an anti-MAdCAM antibody) and anti-huIgG (to detect the anti-PD-1-MAdCAM bispecific molecule) and imaged on a confocal microscope. Data showed localization of the anti-PD-1-MAdCAM bispecific molecule to mesencetrinc lymph node, pancreatic lymph node, and pancreas (FIG. 21). Accordingly, the anti-PD-1-MAdCAM bispecific molecule localizes to MAdCAM expressing structures in NOD mice.

### Example 48. Anti-PD-1-MAdCAM Bispecific Molecule Increase Immune Activation Marker

[0604] Sixteen week old NOD mice were treated on day 0 with a SC 3 mg/kg dose of the anti-PD-1-MAdCAM bispecific molecule, untethered PD-1 agonist, or vehicle alone and sacrificed at the indicated time points. FACS analysis was run after IGRP tetramer pulldown on pool peripheral lymphoid organs. Data showed increase in % Tet+ CD44+ PD-1lo at 2 and 4 days after treatment with the anti-PD-1-MAdCAM bispecific molecule, and an increase in % IGRP+ Tim3+ at 2 and 4 days following treatment with the anti-PD-1-MAdCAM bispecific molecule. The anti-PD-1-MAdCAM bispecific molecule can regulate immune activation markers.

### Example 49. Anti-PD-1-MAdCAM Bispecific Molecule Delays PD-L1 Blockade Mediated NOD T1D

[0605] Six-week old female NOD mice were dosed IP with 500 ug on day 0, and every 2 days with 250 ug of PD-L1 blocking antibody (10F.9G2, an anti-PD1 antibody). One group of mice was also dosed with a 1 mg/kg SC dose of the anti-PD-1-MAdCAM bispecific molecule at day 0 and day 7. Blood glucose was monitored every two days by tail vein stick. Data showed delayed onset of PD-L1 blockade mediated NOD T1D after treatment with the anti-PD-1-MAdCAM bispecific molecule and PD-L1 blockade. Additionally, treatment with the anti-PD-1-MAdCAM bispecific molecule and PD-L1 blockade resulted in glucose levels that were within the levels of vehicle treated mice, and lower than mice treated with the PD-L1 blockade alone. Accordingly, the anti-PD-1-MAdCAM bispecific molecule delays PD-L1 blockade mediated NOD T1D.

[0606] The disclosures of each and every patent, patent application, and publication cited herein are hereby incorporated herein by reference in their entirety. While various embodiments have been disclosed with reference to specific aspects, it is apparent that other aspects and variations of these embodiments may be devised by others skilled in the art without departing from the true spirit and scope of the embodiments. The appended claims are intended to be construed to include all such aspects and equivalent variations.

1. A method of treating Type 1 diabetes comprising administering to a subject in need thereof, an anti-PD-1 agonist antibody linked to an anti-MAdCAM antibody, or antigen binding fragment thereof, wherein the anti-MAdCAM antibody, or antigen binding fragment thereof, comprises:
i) a heavy chain variable region comprising heavy chain CDR1, CDR2, and CDR3 sequences, wherein the heavy chain CDR1 has an amino acid sequence comprising SEQ ID NO:1499 or comprising a sequence having one amino acid substitution relative to SEQ ID NO: 1499; the heavy chain CDR2 has an amino acid sequence comprising SEQ ID NO: 1506 or comprising an amino acid sequence having one amino acid substitution relative to SEQ ID NO: 1506; and the heavy chain CDR3 has an amino acid sequence comprising SEQ ID NOs: 1507, 1531, or 1532 or comprising an amino acid sequence having one amino acid substitution relative to SEQ ID NOs: 1507, 1531, or 1532; and
(ii) a light chain variable region comprising light chain CDR1, CDR2, and CDR3 sequences, wherein the light chain CDR1 has an amino acid sequence comprising SEQ ID NO:1502 or comprising a sequence having one amino acid substitution relative to SEQ ID NO: 1502; the light chain CDR2 has an amino acid sequence comprising SEQ ID NO: 1497 or comprising an amino acid sequence having one amino acid substitution relative to SEQ ID NO: 1497; and the light chain CDR3 has an amino acid sequence comprising SEQ ID NO:1498 or comprising an amino acid sequence having one amino acid substitution relative to SEQ ID NO: 1498.

2-3. (canceled)

4. The method of claim 1, wherein the anti-MAdCAM antibody, or antigen binding fragment thereof, heavy chain variable region comprises a heavy chain CDR1 comprising the amino acid sequence of SEQ ID NO: 1499, a heavy chain CDR2 comprising the amino acid sequence of SEQ ID NO: 1506, and a heavy chain CDR3 comprising the amino acid sequence of SEQ ID NO: 1507, SEQ ID NO: 1531 or SEQ ID NO: 1532.

5-6. (canceled)

7. The method of claim 4, wherein the anti-MAdCAM antibody, or antigen binding fragment thereof, light chain variable region comprises a light chain CDR1 comprising the amino acid sequence of SEQ ID NO: 1502, a light chain CDR2 comprising the amino acid sequence of SEQ ID NO: 1497, and a light chain CDR3 comprising the amino acid sequence of SEQ ID NO: 1498.

8. The method of claim 1, wherein the anti-MAdCAM antibody, or antigen binding fragment thereof, heavy chain variable region comprises an amino acid sequence having at least 90% identity to the amino acid sequence of SEQ ID NO: 1445, 1477, or 1480 and the anti-MAdCAM antibody light chain variable region comprises an amino acid sequence having at least 90% identity to the amino acid sequence of SEQ ID NO: 1367.

9. The method of claim 8, wherein the anti-MAdCAM antibody, or antigen binding fragment thereof, heavy chain variable region comprises an amino acid sequence of SEQ ID NOs: 1445, 1477, or 1480 and the anti-MAdCAM antibody light chain variable region comprises an amino acid of SEQ ID NO: 1367.

10. The method of claim 9, wherein the anti-MAdCAM antibody, or antigen binding fragment thereof, heavy chain variable region and the light chain variable region are in a Fab, or an scFv format.

11. The method of claim 9, wherein the anti-MAdCAM antibody, or antigen binding fragment thereof, heavy chain variable region and the light variable chain region are linked with a peptide linker.

12. The method of claim 11, wherein the peptide linker is a glycine/serine linker.

13. A method of treating Type 1 diabetes comprising administering to a subject in need thereof, an effector molecule linked to an antibody, or antigen binding fragment thereof, wherein the antibody comprises:
a light chain variable region comprising an amino acid sequence having at least 90% identity to an amino acid sequence selected from SEQ ID NOs: 592, 1360, 1361, 1362, 1363, 1364, 1365, 1366, 1367, 1368, 1369, 1370, 1371, 1372, 1373, 1374, 1375, 1376, 1380, 1381, 1382, 1383, 1384, 1385, 1386, 1464, 1465, 1466, 1467, or 1543; and
a heavy chain variable region comprising an amino acid sequence having at least 90% identity to an amino acid sequence selected from SEQ ID NOs: 591, 1346, 1347, 1348, 1349, 1350, 1351, 1352, 1353, 1354, 1355, 1356, 1357, 1358, 1377, 1378, 1379, 1387, 1388, 1389, 1390, 1391, 1392, 1393, 1394, 1395, 1396, 1397, 1398, 1439, 1440, 1441, 1442, 1443, 1444, 1445, 1450, 1451, 1452, 1453, 1454, 1455, 1456, 1457, 1458, 1459, 1460, 1461, 1462, 1463, 1469, 1470, 1471, 1472, 1473, 1474, 1475, 1477, 1480, 1542, 1544, or 1545.

14. The method of claim 13, wherein the effector molecule is a PD-1 agonist.

15. The method of claim 14, wherein the PD-1 agonist is an antibody that binds to PD-1.

16. The method of claim 15, wherein the antibody that binds to PD-1 comprises:
i) a heavy chain variable region comprising heavy chain CDR1, CDR2, and CDR3 sequences, wherein the heavy chain CDR1 comprises the amino acid sequence of SEQ ID NO: 1481, or 1487; the heavy chain CDR2 comprises the amino acid sequence of SEQ ID NO: 1482, or 1488; and the heavy chain CDR3 comprises the amino acid sequence any one of SEQ ID NOs: 1483 or 1489; and
(ii) a light chain variable region comprising light chain CDR1, CDR2, and CDR3 sequences, wherein the light chain CDR1 comprises the amino acid sequence of SEQ ID NO: 1484, 1490, or 1214; the light chain CDR2 comprises the amino acid sequence of SEQ ID NO: 1485, or 1491; and the light chain CDR3 comprises the amino acid sequence any one of SEQ ID NOs: 1486 or 1492.

17. The method of claim 16, wherein the antibody that binds to PD-1 comprises:
a light chain variable region comprising an amino acid sequence having at least 90% identity to an amino acid sequence selected from SEQ ID NOs: 1359, 1449, or 1479; and
a heavy chain variable region comprising an amino acid sequence having at least 90% identity to an amino acid sequence selected from SEQ ID NOs: 1438, 1446, 1447, 1448, 1476, or 1478.

18. A method of delaying, reducing, or treating, hyperglycemia comprising administering; to a subject in need thereof; a composition comprising an effector molecule linked to an anti-MAdCAM antibody, or antigen binding fragment thereof;
and a pharmaceutically acceptable carrier.

19. The method of claim 18, wherein the effector molecule is a PD-1 agonist.

20. The method of claim 19, wherein the PD-1 agonist is an antibody that binds to PD-1.

21. (canceled)

22. The method of claim 20, wherein the anti-MAdCAM antibody, or antigen binding fragment thereof, comprises:
i) a heavy chain variable region comprising heavy chain CDR1, CDR2, and CDR3 sequences, wherein the heavy chain CDR1 comprises the amino acid sequence of SEQ ID NO: 1499; the heavy chain CDR2 comprises the amino acid of SEQ ID NO: 1506; and the heavy chain CDR3 comprises the amino acid sequence of any one of SEQ ID NOs: 1507, 1531, or 1532; and
(ii) a light chain variable region comprising light chain CDR1, CDR2, and CDR3 sequences, wherein the light chain CDR1 comprises the amino acid sequence of SEQ ID NO: 1502; the light chain CDR2 comprises the amino acid sequence of SEQ ID NO: 1497; and the light chain CDR3 comprises the amino acid sequence of SEQ ID NO: 1498.

23-42. (canceled)

The application's sequence listing, which the Patent Office published only in electronic form, follows.

SEQUENCE LISTING (1554 sequences)

SEQ ID NO: 1-2 - skipped (2 entries)

SEQ ID NO: 3 - protein, 290 aa, Artificial Sequence
  Description of Artificial Sequence: Synthetic polypeptide
MRIFAVFIFMTYWHLLNAFTVTVPKDLYVVEYGSNMTIECKFPVEKQLDLAALIVYWEMEDKNIIQFVHGEEDLKVQHSSYRQRARLLKDQLSLGNAALQITDVKLQDAGVYRCMISYGGADYKRITVKVNAPYNKINQRILVVDPVTSEHELTCQAEGYPKAEVIWTSSDHQVLSGKTTTTNSKREEKLFNVTSTLRINTTTNEIFYCTFRRLDPEENHTAELVIPELPLAHPPNERTHLVILGAILLCLGVALTFIFRLRKGRMMDVKKCGIQDTNSKKQSDTHLEET

SEQ ID NO: 4 - protein, 313 aa, Artificial Sequence
  Description of Artificial Sequence: Synthetic polypeptide
MVVMAPRTLFLLLSGALTLTETWAGSHSMRYFSAAVSRPGRGEPRFIAMGYVDDTQFVRFDSDSACPRMEPRAPWVEQEGPEYWEEETRNTKAHAQTDRMNLQTLRGYYNQSEASSHTLQWMIGCDLGSDGRLLRGYEQYAYDGKDYLALNEDLRSWTAADTAAQISKRKCEAANVAEQRRAYLEGTCVEWLHRYLENGKEMLQRADPPKTHVTHHPVFDYEATLRCWALGFYPAEIILTWQRDGEDQTQDVELVETRPAGDGTFQKWAAVVVPSGEEQRYTCHVQHEGLPEPLMLRWKQSSLPTIPIMGIVA

SEQ ID NO: 5 - skipped

SEQ ID NO: 6 - protein, 133 aa, Artificial Sequence [sequence omitted]

SEQ ID NO: 7 - protein, 369 aa, Artificial Sequence
  Description of Artificial Sequence: Synthetic polypeptide
APTSSSTKKTQLQLEHLLLDLQMILNGINNYKNPKLTRMLTFKFYMPKKATELKHLQCLEEELKPLEEVLNLAQSKNFHLRPRDLISRINVIVLELKGSETTFMCEYADETATIVEFLNRWITFSQSIISTLTGGGGAGGGGDKTHTCPPCPAPELLGGPSVFLFPPKPKDTLMISRTPEVTCVVVDVSHEDPEVKFNWYVDGVEVHNAKTKPREEQYASTYRVVSVLTVLHQDWLNGKEYKCKVSNKALPAPIEKTISKAKGQPREPQVYTLPPSRDELTKNQVSLTCLVKGFYPSDIAVEWESNGQPENNYKTTPPVLDSDGSFFLYSKLTVDKSRWQQGNVFSCSVMHEALHNHYTQKSLSLSPGK

SEQ ID NO: 8 - protein, 356 aa, Artificial Sequence
  Description of Artificial Sequence: Synthetic polypeptide
APTSSSTKKTQLQLEHLLLHLQMILNGINNYKNPKLTRMLTFKFYMPKKATELKHLQCLEEELKPLEEVLNLAQSKNFHLRPRDLISNINVIVLELKGSETTFMCEYADETATIVEFLNRWITFSQSIISTLTVECPPCPAPPVAGPSVFLFPPKPKDTLMISRTPEVTCVVVDVSHEDPEVQFNWYVDGVEVHNAKTKPREEQFNSTFRVVSVLTVVHQDWLNGKEYKCKVSNKGLPAPIEKTISKTKGQPREPQVYTLPPSREEMTKNQVSLTCLVKGFYPSDIAVEWESNGQPENNYKTTPPMLDSDGSFFLYSKLTVDKSRWQQGNVFSCSVMHEALHNHYTQKSLSLSPGK

SEQ ID NO: 9 - protein, 359 aa, Artificial Sequence
  Description of Artificial Sequence: Synthetic polypeptide
APTSSSTKKTQLQLEHLLLDLQMILNGINNYKNPKLTRMLTFKFYMPKKATELKHLQCLEEELKPLEEVLNLAQSKNFHLRPRDLISRINVIVLELKGSETTFMCEYADETATIVEFLNRWITFSQSIISTLTDKTHTCPPCPAPELLGGPSVFLFPPKPKDTLMISRTPEVTCVVVDVSHEDPEVKFNWYVDGVEVHNAKTKPREEQYASTYRVVSVLTVLHQDWLNGKEYKCKVSNKALPAPIEKTISKAKGQPREPQVYTLPPSRDELTKNQVSLTCLVKGFYPSDIAVEWESNGQPENNYKTTPPVLDSDGSFFLYSKLTVDKSRWQQGNVFSCSVMHEALHNHYTQKSLSLSPG

SEQ ID NO: 10 - protein, 364 aa, Artificial Sequence
  Description of Artificial Sequence: Synthetic polypeptide
APTSSSTKKTQLQLEHLLLDLQMILNGINNYKNPKLTRMLTFKFYMPKKATELKHLQCLEEELKPLEEVLNLAQSKNFHLRPRDLISRINVIVLELKGSETTFMCEYADETATIVEFLNRWITFSQSIISTLTGGGGSDKTHTCPPCPAPELLGGPSVFLFPPKPKDTLMISRTPEVTCVVVDVSHEDPEVKFNWYVDGVEVHNAKTKPREEQYASTYRVVSVLTVLHQDWLNGKEYKCKVSNKALPAPIEKTISKAKGQPREPQVYTLPPSRDELTKNQVSLTCLVKGFYPSDIAVEWESNGQPENNYKTTPPVLDSDGSFFLYSKLTVDKSRWQQGNVFSCSVMHEALHNHYTQKSLSLSPG

SEQ ID NO: 11 - protein, 369 aa, Artificial Sequence
  Description of Artificial Sequence: Synthetic polypeptide
APTSSSTKKTQLQLEHLLLDLQMILNGINNYKNPKLTRMLTFKFYMPKKATELKHLQCLEEELKPLEEVLNLAQSKNFHLRPRDLISRINVIVLELKGSETTFMCEYADETATIVEFLNRWITFSQSIISTLTGGGGSGGGGSDKTHTCPPCPAPELLGGPSVFLFPPKPKDTLMISRTPEVTCVVVDVSHEDPEVKFNWYVDGVEVHNAKTKPREEQYASTYRVVSVLTVLHQDWLNGKEYKCKVSNKALPAPIEKTISKAKGQPREPQVYTLPPSRDELTKNQVSLTCLVKGFYPSDIAVEWESNGQPENNYKTTPPVLDSDGSFFLYSKLTVDKSRWQQGNVFSCSVMHEALHNHYTQKSLSLSPG

SEQ ID NO: 12 - protein, 374 aa, Artificial Sequence
  Description of Artificial Sequence: Synthetic polypeptide
APTSSSTKKTQLQLEHLLLDLQMILNGINNYKNPKLTRMLTFKFYMPKKATELKHLQCLEEELKPLEEVLNLAQSKNFHLRPRDLISRINVIVLELKGSETTFMCEYADETATIVEFLNRWITFSQSIISTLTGGGGSGGGGSGGGGSDKTHTCPPCPAPELLGGPSVFLFPPKPKDTLMISRTPEVTCVVVDVSHEDPEVKFNWYVDGVEVHNAKTKPREEQYASTYRVVSVLTVLHQDWLNGKEYKCKVSNKALPAPIEKTISKAKGQPREPQVYTLPPSRDELTKNQVSLTCLVKGFYPSDIAVEWESNGQPENNYKTTPPVLDSDGSFFLYSKLTVDKSRWQQGNVFSCSVMHEALHNYHTQKSLSLSPG

SEQ ID NO: 13 - protein, 379 aa, Artificial Sequence
  Description of Artificial Sequence: Synthetic polypeptide
APTSSSTKKTQLQLEHLLLDLQMILNGINNYKNPKLTRMLTFKFYMPKKATELKHLQCLEEELKPLEEVLNLAQSKNFHLRPRDLISRINVIVLELKGSETTFMCEYADETATIVEFLNRWITFSQSIISTLTGGGGSGGGGSGGGGSGGGGSDKTHTCPPCPAPELLGGPSVFLFPPKPKDTLMISRTPEVTCVVVDVSHEDPEVKFNWYVDGVEVHNAKTKPREEQYASTYRVVSVLTVLHQDWLNGKEYKCKVSNKALPAPIEKTISKAKGQPREPQVYTLPPSRDELTKNQVSLTCLVKGFYPSDIAVEWESNGQPENNYKTTPPVLDSDGSFFLYSKLTVDKSRWQQGNVFSCSVMHEALHNHYTQKSLSLSPG

SEQ ID NO: 14 - protein, 374 aa, Artificial Sequence
  Description of Artificial Sequence: Synthetic polypeptide
APTSSSTKKTQLQLEHLLLHLQMILNGINNYKNPKLTRMLTFKFYMPKKATELKHLQCLEEELKPLEEVLNLAQSKNFHLRPRDLISNINVIVLELKGSETTFMCEYADETATIVEFLNRWITFSQSIISTLTGGGGSGGGGSGGGGSDKTHTCPPCPAPELLGGPSVFLFPPKPKDTLMISRTPEVTCVVVDVSHEDPEVKFNWYVDGVEVHNAKTKPREEQYASTYPVVSVLTVLHQDWLNGKEYKCKVSNKALPAPIEKTISKAKGQPREPQVYTLPPSRDELTKNQVSLTCLVKGFYPSDIAVEWESNGQPENNYKTTPPVLDSDGSFFLYSKLTVDKSRWQQGNVFSCSVMHEALHNHYTQKSLSLSPG

SEQ ID NO: 15 - protein, 153 aa, Artificial Sequence
  Description of Artificial Sequence: Synthetic polypeptide
MYRMQLLSCIALSLALVTNSAPTSSSTKKTQLQLEHLLLDLQMILNGINNYKNPKLTRMLTFKFYMPKKATELKHLQCLEEELKPLEEVLNLAQSKNFHLRPRDLISNINVIVLELKGSETTFMCEYADETATIVEFLNRWITFCQSIISTLT

SEQ ID NO: 16 - protein, 153 aa, Artificial Sequence
  Description of Artificial Sequence: Synthetic polypeptide
MYRMQLLSCIALSLALVTNSAPTSSSTKKTQLQLEHLLLDLQMILNGISNHKNPRLARMLTFKFYMPEKATEIKHLQCLEEELKPLEEALRLAPSKNFHLRPRDLISDINVIVLELKGSETTFMCEYADETATIVEFLNRWITFSQSIISTLT

SEQ ID NO: 17 - protein, 153 aa, Artificial Sequence
  Description of Artificial Sequence: Synthetic polypeptide
MYRMQLLSCIALSLALVTNSAPTSSSTKKTQLQLEHLLLDLQMILNGISNHKNPRLARMLTFKFYMPEKATELKHIQCLEEELKPLEEALRLAPSKNFHLRPRDLISDINVIVLELKGSETTFMCEYADETATIVEFLNRWITFSQSIISTLT

SEQ ID NO: 18 - protein, 153 aa, Artificial Sequence
  Description of Artificial Sequence: Synthetic polypeptide
MYRMQLLSCIALSLALVTNSAPTSSSTKKTQLQLEHLLLDLQMILNGISNHKNPRLARMLTFKFYMPEKATELKHLQCLEEELKPLEEALRLAPSKNFHIRPRDLISDINVIVLELKGSETTFMCEYADETATIVEFLNRWITFSQSIISTLT

SEQ ID NO: 19 - protein, 153 aa, Artificial Sequence
  Description of Artificial Sequence: Synthetic polypeptide
MYRMQLLSCIALSLALVTNSAPTSSSTKKTQLQLEHLLLDLQMILNGISNHKNPRLARMLTFKFYMPEKATELKHLQCLEEELKPLEEALRLAPSKNFHLRPRDLISDINVIVLELKGSETTFMCEYADETATIVEFINRWITFSQSIISTLT

SEQ ID NO: 20 - protein, 20 aa, Artificial Sequence
  Description of Artificial Sequence: Synthetic peptide
MYRMQLLSCIALSLALVTNS

SEQ ID NO: 21 - protein, 226 aa, Artificial Sequence
  Description of Artificial Sequence: Synthetic polypeptide
DKTHTCPPCPAPEAAGAPSVFLFPPKPKDTLMISRTPEVTCVVVDVSHEDPEVKFNWYVDGVEVHNAKTKPREEQYNSTYRVVSVLTVLHQDWLNGKEYKCKVSNKALPAPIEKTISKAKGQPREPQVYTLPPSREEMTKNQVSLTCLVKGFYPSDIAVEWESNGQPENNYKTTPPVLDSDGSFFLYSKLTVDKSRWQQGNVFSCSVMHEALHNHYTQKSLSLSPG

SEQ ID NO: 22 - protein, 20 aa, Artificial Sequence
  Description of Artificial Sequence: Synthetic peptide
GGGGSGGGGSGGGGSGGGGS

SEQ ID NO: 23 - protein, 5 aa, Artificial Sequence
  Description of Artificial Sequence: Synthetic peptide
GGGGS

SEQ ID NO: 24 - protein, 399 aa, Artificial Sequence
  Description of Artificial Sequence: Synthetic polypeptide
MYRMQLLSCIALSLALVTNSAPTSSSTKKTQLQLEHLLLDLQMILNGISNHKNPRLARMLTFKFYMPEKATEIKHLQCLEEELKPLEEALRLAPSKNFHLRPRDLISDINVIVLELKGSETTFMCEYADETATIVEFLNRWITFSQSIISTLTGGGGSGGGGSGGGGSGGGGSDKTHTCPPCPAPEAAGAPSVFLFPPKPKDTLMISRTPEVTCVVVDVSHEDPEVKFNWYVDGVEVHNAKTKPREEQYNSTYRVVSVLTVLHQDWLNGKEYKCKVSNKALPAPIEKTISKAKGQPREPQVYTLPPSREEMTKNQVSLTCLVKGFYPSDIAVEWESNGQPENNYKTTPPVLDSDGSFFLYSKLTVDKSRWQQGNVFSCSVMHEALHNHYTQKSLSLSPG

SEQ ID NO: 25 - protein, 399 aa, Artificial Sequence
  Description of Artificial Sequence: Synthetic polypeptide
MYRMQLLSCIALSLALVTNSAPTSSSTKKTQLQLEHLLLDLQMILNGISNHKNPRLARMLTFKFYMPEKATELKHIQCLEEELKPLEEALRLAPSKNFHLRPRDLISDINVIVLELKGSETTFMCEYADETATIVEFLNRWITFSQSIISTLTGGGGSGGGGSGGGGSGGGGSDKTHTCPPCPAPEAAGAPSVFLFPPKPKDTLMISRTPEVTCVVVDVSHEDPEVKFNWYVDGVEVHNAKTKPREEQYNSTYRVVSVLTVLHQDWLNGKEYKCKVSNKALPAPIEKTISKAKGQPREPQVYTLPPSREEMTKNQVSLTCLVKGFYPSDIAVEWESNGQPENNYKTTPPVLDSDGSFFLYSKLTVDKSRWQQGNVFSCSVMHEALHNHYTQKSLSLSPG

SEQ ID NO: 26 - protein, 399 aa, Artificial Sequence
  Description of Artificial Sequence: Synthetic polypeptide
MYRMQLLSCIALSLALVTNSAPTSSSTKKTQLQLEHLLLDLQMILNGISNHKNPRLARMLTFKFYMPEKATELKHLQCLEEELKPLEEALRLAPSKNFHIRPRDLISDINVIVLELKGSETTFMCEYADETATIVEFLNRWITFSQSIISTLTGGGGSGGGGSGGGGSGGGGSDKTHTCPPCPAPEAAGAPSVFLFPPKPKDTLMISRTPEVTCVVVDVSHEDPEVKFNWYVDGVEVHNAKTKPREEQYNSTYRVVSVLTVLHQDWLNGKEYKCKVSNKALPAPIEKTISKAKGQPREPQVYTLPPSREEMTKNQVSLTCLVKGFYPSDIAVEWESNGQPENNYKTTPPVLDSDGSFFLYSKLTVDKSRWQQGNVFSCSVMHEALHNHYTQKSLSLSPG

SEQ ID NO: 27 - protein, 399 aa, Artificial Sequence
  Description of Artificial Sequence: Synthetic polypeptide
MYRMQLLSCIALSLALVTNSAPTSSSTKKTQLQLEHLLLDLQMILNGISNHKNPRLARMLTFKFYMPEKATELKHLQCLEEELKPLEEALRLAPSKNFHLRPRDLISDINVIVLELKGSETTFMCEYADETATIVEFINRWITFSQSIISTLTGGGGSGGGGSGGGGSGGGGSDKTHTCPPCPAPEAAGAPSVFLFPPKPKDTLMISRTPEVTCVVVDVSHEDPEVKFNWYVDGVEVHNAKTKPREEQYNSTYRVVSVLTVLHQDWLNGKEYKCKVSNKALPAPIEKTISKAKGQPREPQVYTLPPSREEMTKNQVSLTCLVKGFYPSDIAVEWESNGQPENNYKTTPPVLDSDGSFFLYSKLTVDKSRWQQGNVFSCSVMHEALHNHYTQKSLSLSPG

SEQ ID NO: 28 - protein, 226 aa, Artificial Sequence
  Description of Artificial Sequence: Synthetic polypeptide
DKTHTCPPCPAPELLGGPSVFLFPPKPKDTLMISRTPEVTCVVVDVSHEDPEVKFNWYVDGVEVHNAKTKPREEQYNSTYRVVSVLTVLHQDWLNGKEYKCKVSNKALPAPIEKTISKAKGQPREPQVYTLPPSREEMTKNQVSLTCLVKGFYPSDIAVEWESNGQPENNYKTTPPVLDSDGSFFLYSKLTVDKSRWQQGNVFSCSVMHEALHNHYTQKSLSLSPG

SEQ ID NO: 29 - protein, 5 aa, Artificial Sequence
  Description of Artificial Sequence: Synthetic peptide
GGGGA

SEQ ID NO: 30 - protein, 15 aa, Artificial Sequence
  Description of Artificial Sequence: Synthetic peptide
GGGGSGGGGSGGGGS

SEQ ID NO: 31 - protein, 133 aa, Artificial Sequence
  Description of Artificial Sequence: Synthetic polypeptide
APTSSSTKKTQLQLEHLLLDLQMILNGINNYKNPKLTRMLTFKFYMPKKATELKHLQCLEEELKPLEEVLNLAQSKNFHLRPRDLISNINVIVLELKGSETTFMCEYADETATIVEFLNRWITFSQSIISTLT

SEQ ID NO: 32 - protein, 133 aa, Artificial Sequence
  Description of Artificial Sequence: Synthetic polypeptide
APASSSTKKTQLQLEHLLLDLQMILNGINNYKNPKLTRMLTFKFYMPKKATELKHLQCLEEELKPLEEVLNLAQSKNFHLRPRDLISNINVIVLELKGSETTFMCEYADETATIVEFLNRWITFSQSIISTLT

SEQ ID NO: 33 - protein, 133 aa, Artificial Sequence
  Description of Artificial Sequence: Synthetic polypeptide
APTSSSTKKTQLQLEHLLLDLQMILNGINNYKNPKLTRMLTFKFYMPKKATELKHLQCLEEELKPLEEVLNLAQSKNFHLRPRDLISRINVIVLELKGSETTFMCEYADETATIVEFLNRWITFSQSIISTLT

SEQ ID NO: 34 - protein, 133 aa, Artificial Sequence [sequence omitted]

SEQ ID NO: 35 - protein, 133 aa, Artificial Sequence
  Description of Artificial Sequence: Synthetic polypeptide
APTSSSTKKTQLQLEHLLLDLQMILNGINNYKNPKLTRMLTFKFYMPKKATELKHLQCLEEELKPLEEALNLAPSKNFHLRPRDLISDINVIVLELKGSETTFMCEYADETATIVEFLNRWITFSQSIISTLT

SEQ ID NO: 36 - protein, 133 aa, Artificial Sequence
  Description of Artificial Sequence: Synthetic polypeptide
APTSSSTKKTQLQLEHLLLDLQMILNGINNYKNPKLTRMLTFKFYMPKKATELKHLQCLEEELKPLEEALNLAPSKNFHLRPRDLISRINVIVLELKGSETTFMCEYADETATIVEFLNRWITFSQSIISTLT

SEQ ID NO: 37 - protein, 133 aa, Artificial Sequence
  Description of Artificial Sequence: Synthetic polypeptide
APTSSSTKKTQLQLEHLLLDLQMILNGINNYKNPKLTRMLTFKFYMPKKATELKHLQCLEEELKPLEEVLNLAQSKNFHLRPRDLISDINVIVLELKGSETTFMCEYADETATIVEFLNRWITFSQSIISTLT

SEQ ID NO: 38 - protein, 133 aa, Artificial Sequence
  Description of Artificial Sequence: Synthetic polypeptide
APTSSSTKKTQLQLEHLLLDLQMILNGINNYKNPKLTRMLTFKFYMPKKATEIKHLQCLEEELKPLEEALNLAPSKNFHLRPRDLISDINVIVLELKGSETTFMCEYADETATIVEFLNRWITFSQSIISTLT

SEQ ID NO: 39 - protein, 133 aa, Artificial Sequence
  Description of Artificial Sequence: Synthetic polypeptide
APTSSSTKKTQLQLEHLLLDLQMILNGINNYKNPKLTRMLTFKFYMPKKATELKHIQCLEEELKPLEEALNLAPSKNFHLRPRDLISDINVIVLELKGSETTFMCEYADETATIVEFLNRWITFSQSIISTLT

SEQ ID NO: 40 - protein, 133 aa, Artificial Sequence
  Description of Artificial Sequence: Synthetic polypeptide
APTSSSTKKTQLQLEHLLLDLQMILNGINNYKNPKLTRMLTFKFYMPKKATELKHLQCLEEELKPLEEALNLAPSKNFHIRPRDLISDINVIVLELKGSETTFMCEYADETATIVEFLNRWITFSQSIISTLT

SEQ ID NO: 41 - protein, 133 aa, Artificial Sequence
  Description of Artificial Sequence: Synthetic polypeptide
APTSSSTKKTQLQLEHLLLDLQMILNGINNYKNPKLTRMLTFKFYMPKKATELKHLQCLEEELKPLEEALNLAPSKNFHLRPRDLISDINVIVLELKGSETTFMCEYADETATIVEFINRWITFSQSIISTLT

SEQ ID NO: 42 - protein, 585 aa, Artificial Sequence [sequence omitted]

SEQ ID NO: 43 - protein, 226 aa, Artificial Sequence
  Description of Artificial Sequence: Synthetic polypeptide
DKTHTCPPCPAPELLGGPSVFLFPPKPKDTLMISRTPEVTCVVVDVSHEDPEVKFNWYVDGVEVHNAKTKPREEQYGSTYRVVSVLTVLHQDWLNGKEYKCKVSNKALPAPIEKTISKAKGQPREPQVYTLPPSREEMTKNQVSLTCLVKGFYPSDIAVEWESNGQPENNYKTTPPVLDSDGSFFLYSKLTVDKSRWQQGNVFSCSVMHEALHNHYTQKSLSLSPG

SEQ ID NO: 44 - protein, 329 aa, Artificial Sequence
  Description of Artificial Sequence: Synthetic polypeptide
ASTKGPSVFPLAPSSKSTSGGTAALGCLVKDYFPEPVTVSWNSGALTSGVHTFPAVLQSSGLYSLSSVVTVPSSSLGTQTYICNVNHKPSNTKVDKKVEPKSCDKTHTCPPCPAPEAAGAPSVFLFPPKPKDTLMISRTPEVTCVVVDVSHEDPEVKFNWYVDGVEVHNAKTKPREEQYNSTYRVVSVLTVLHQDWLNGKEYKCKVSNKALPAPIEKTISKAKGQPREPQVYTLPPSREEMTKNQVSLTCLVKGFYPSDIAVEWESNGQPENNYKTTPPVLDSDGSFFLYSKLTVDKSRWQQGNVFSCSVMHEALHNHYTQKSLSLSPG

SEQ ID NO: 45 - protein, 107 aa, Artificial Sequence [sequence omitted]

SEQ ID NO: 46 - protein, 374 aa, Artificial Sequence
  Description of Artificial Sequence: Synthetic polypeptide
APTSSSTKKTQLQLEHLLLDLQMILNGINNYKNPKLTRMLTFKFYMPKKATELKHLQCLEEELKPLEEVLNLAQSKNFHLRPRDLISNINVIVLELKGSETTFMCEYADETATIVEFLNRWITFSQSIISTLTGGGGSGGGGSGGGGSDKTHTCPPCPAPEAAGAPSVFLFPPKPKDTLMISRTPEVTCVVVDVSHEDPEVKFNWYVDGVEVHNAKTKPREEQYNSTYRVVSVLTVLHQDWLNGKEYKCKVSNKALPAPIEKTISKAKGQPREPQVYTLPPSREEMTKNQVSLTCLVKGFYPSDIAVEWESNGQPENNYKTTPPVLDSDGSFFLYSKLTVDKSRWQQGNVFSCSVMHEALHNHYTQKSLSLSPG

SEQ ID NO: 47 - protein, 374 aa, Artificial Sequence
  Description of Artificial Sequence: Synthetic polypeptide
APASSSTKKTQLQLEHLLLDLQMILNGINNYKNPKLTRMLTFKFYMPKKATELKHLQCLEEELKPLEEVLNLAQSKNFHLRPRDLISNINVIVLELKGSETTFMCEYADETATIVEFLNRWITFSQSIISTLTGGGGSGGGGSGGGGSDKTHTCPPCPAPEAAGAPSVFLFPPKPKDTLMISRTPEVTCVVVDVSHEDPEVKFNWYVDGVEVHNAKTKPREEQYNSTYRVVSVLTVLHQDWLNGKEYKCKVSNKALPAPIEKTISKAKGQPREPQVYTLPPSREEMTKNQVSLTCLVKGFYPSDIAVEWESNGQPENNYKTTPPVLDSDGSFFLYSKLTVDKSRWQQGNVFSCSVMHEALHNHYTQKSLSLSPG

SEQ ID NO: 48 - protein, 374 aa, Artificial Sequence
  Description of Artificial Sequence: Synthetic polypeptide
APTSSSTKKTQLQLEHLLLDLQMILNGINNYKNPKLTRMLTFKFYMPKKATELKHLQCLEEELKPLEEVLNLAQSKNFHLRPRDLISRINVIVLELKGSETTFMCEYADETATIVEFLNRWITFSQSIISTLTGGGGSGGGGSGGGGSDKTHTCPPCPAPEAAGAPSVFLFPPKPKDTLMISRTPEVTCVVVDVSHEDPEVKFNWYVDGVEVHNAKTKPREEQYNSTYRVVSVLTVLHQDWLNGKEYKCKVSNKALPAPIEKTISKAKGQPREPQVYTLPPSREEMTKNQVSLTCLVKGFYPSDIAVEWESNGQPENNYKTTPPVLDSDGSFFLYSKLTVDKSRWQQGNVFSCSVMHEALHNHYTQKSLSLSPG

SEQ ID NO: 49 - protein, 374 aa, Artificial Sequence
  Description of Artificial Sequence: Synthetic polypeptide
APTSSSTKKTQLQLEHLLLDLQMILNGINNYKNPKLTRMLTFKFYMPKKATELKHLQCLEEELKPLEEALNLAPSKNFHLRPRDLISNINVIVLELKGSETTFMCEYADETATIVEFLNRWITFSQSIISTLTGGGGSGGGGSGGGGSDKTHTCPPCPAPEAAGAPSVFLFPPKPKDTLMISRTPEVTCVVVDVSHEDPEVKFNWYVDGVEVHNAKTKPREEQYNSTYRVVSVLTVLHQDWLNGKEYKCKVSNKALPAPIEKTISKAKGQPREPQVYTLPPSREEMTKNQVSLTCLVKGFYPSDIAVEWESNGQPENNYKTTPPVLDSDGSFFLYSKLTVDKSRWQQGNVFSCSVMHEALHNHYTQKSLSLSPG

SEQ ID NO: 50 - protein, 374 aa, Artificial Sequence
  Description of Artificial Sequence: Synthetic polypeptide
APTSSSTKKTQLQLEHLLLDLQMILNGINNYKNPKLTRMLTFKFYMPKKATELKHLQCLEEELKPLEEALNLAPSKNFHLRPRDLISDINVIVLELKGSETTFMCEYADETATIVEFLNRWITFSQSIISTLTGGGGSGGGGSGGGGSDKTHTCPPCPAPEAAGAPSVFLFPPKPKDTLMISRTPEVTCVVVDVSHEDPEVKFNWYVDGVEVHNAKTKPREEQYNSTYRVVSVLTVLHQDWLNGKEYKCKVSNKALPAPIEKTISKAKGQPREPQVYTLPPSREEMTKNQVSLTCLVKGFYPSDIAVEWESNGQPENNYKTTPPVLDSDGSFFLYSKLTVDKSRWQQGNVFSCSVMHEALHNHYTQKSLSLSPG

SEQ ID NO: 51 - protein, 374 aa, Artificial Sequence
  Description of Artificial Sequence: Synthetic polypeptide
APTSSSTKKTQLQLEHLLLDLQMILNGINNYKNPKLTRMLTFKFYMPKKATELKHLQCLEEELKPLEEALNLAPSKNFHLRPRDLISRINVIVLELKGSETTFMCEYADETATIVEFLNRWITFSQSIISTLTGGGGSGGGGSGGGGSDKTHTCPPCPAPEAAGAPSVFLFPPKPKDTLMISRTPEVTCVVVDVSHEDPEVKFNWYVDGVEVHNAKTKPREEQYNSTYRVVSVLTVLHQDWLNGKEYKCKVSNKALPAPIEKTISKAKGQPREPQVYTLPPSREEMTKNQVSLTCLVKGFYPSDIAVEWESNGQPENNYKTTPPVLDSDGSFFLYSKLTVDKSRWQQGNVFSCSVMHEALHNHYTQKSLSLSPG

SEQ ID NO: 52 - protein, 374 aa, Artificial Sequence
  Description of Artificial Sequence: Synthetic polypeptide
APTSSSTKKTQLQLEHLLLDLQMILNGINNYKNPKLTRMLTFKFYMPKKATELKHLQCLEEELKPLEEVLNLAQSKNFHLRPRDLISDINVIVLELKGSETTFMCEYADETATIVEFLNRWITFSQSIISTLTGGGGSGGGGSGGGGSDKTHTCPPCPAPEAAGAPSVFLFPPKPKDTLMISRTPEVTCVVVDVSHEDPEVKFNWYVDGVEVHNAKTKPREEQYNSTYRVVSVLTVLHQDWLNGKEYKCKVSNKALPAPIEKTISKAKGQPREPQVYTLPPSREEMTKNQVSLTCLVKGFYPSDIAVEWESNGQPENNYKTTPPVLDSDGSFFLYSKLTVDKSRWQQGNVFSCSVMHEALHNHYTQKSLSLSPG

SEQ ID NO: 53 - protein, 379 aa, Artificial Sequence
  Description of Artificial Sequence: Synthetic polypeptide
APTSSSTKKTQLQLEHLLLDLQMILNGINNYKNPKLTRMLTFKFYMPKKATEIKHLQCLEEELKPLEEALNLAPSKNFHLRPRDLISDINVIVLELKGSETTFMCEYADETATIVEFLNRWITFSQSIISTLTGGGGSGGGGSGGGGSGGGGSDKTHTCPPCPAPEAAGAPSVFLFPPKPKDTLMISRTPEVTCVVVDVSHEDPEVKFNWYVDGVEVHNAKTKPREEQYNSTYRVVSVLTVLHQDWLNGKEYKCKVSNKALPAPIEKTISKAKGQPREPQVYTLPPSREEMTKNQVSLTCLVKGFYPSDIAVEWESNGQPENNYKTTPPVLDSDGSFFLYSKLTVDKSRWQQGNVFSCSVMHEALHNHYTQKSLSLSPG

SEQ ID NO: 54 - protein, 379 aa, Artificial Sequence
  Description of Artificial Sequence: Synthetic polypeptide
APTSSSTKKTQLQLEHLLLDLQMILNGINNYKNPKLTRMLTFKFYMPKKATELKHIQCLEEELKPLEEALNLAPSKNFHLRPRDLISDINVIVLELKGSETTFMCEYADETATIVEFLNRWITFSQSIISTLTGGGGSGGGGSGGGGSGGGGSDKTHTCPPCPAPEAAGAPSVFLFPPKPKDTLMISRTPEVTCVVVDVSHEDPEVKFNWYVDGVEVHNAKTKPREEQYNSTYRVVSVLTVLHQDWLNGKEYKCKVSNKALPAPIEKTISKAKGQPREPQVYTLPPSREEMTKNQVSLTCLVKGFYPSDIAVEWESNGQPENNYKTTPPVLDSDGSFFLYSKLTVDKSRWQQGNVFSCSVMHEALHNHYTQKSLSLSPG

SEQ ID NO: 55 - protein, 379 aa, Artificial Sequence
  Description of Artificial Sequence: Synthetic polypeptide
APTSSSTKKTQLQLEHLLLDLQMILNGINNYKNPKLTRMLTFKFYMPKKATELKHLQCLEEELKPLEEALNLAPSKNFHIRPRDLISDINVIVLELKGSETTFMCEYADETATIVEFLNRWITFSQSIISTLTGGGGSGGGGSGGGGSGGGGSDKTHTCPPCPAPEAAGAPSVFLFPPKPKDTLMISRTPEVTCVVVDVSHEDPEVKFNWYVDGVEVHNAKTKPREEQYNSTYRVVSVLTVLHQDWLNGKEYKCKVSNKALPAPIEKTISKAKGQPREPQVYTLPPSREEMTKNQVSLTCLVKGFYPSDIAVEWESNGQPENNYKTTPPVLDSDGSFFLYSKLTVDKSRWQQGNVFSCSVMHEALHNHYTQKSLSLSPG

SEQ ID NO: 56 - protein, 379 aa, Artificial Sequence
  Description of Artificial Sequence: Synthetic polypeptide
APTSSSTKKTQLQLEHLLLDLQMILNGINNYKNPKLTRMLTFKFYMPKKATELKHLQCLEEELKPLEEALNLAPSKNFHLRPRDLISDINVIVLELKGSETTFMCEYADETATIVEFINRWITFSQSIISTLTGGGGSGGGGSGGGGSGGGGSDKTHTCPPCPAPEAAGAPSVFLFPPKPKDTLMISRTPEVTCVVVDVSHEDPEVKFNWYVDGVEVHNAKTKPREEQYNSTYRVVSVLTVLHQDWLNGKEYKCKVSNKALPAPIEKTISKAKGQPREPQVYTLPPSREEMTKNQVSLTCLVKGFYPSDIAVEWESNGQPENNYKTTPPVLDSDGSFFLYSKLTVDKSRWQQGNVFSCSVMHEALHNHYTQKSLSLSPG

SEQ ID NO: 57 - protein, 379 aa, Artificial Sequence
  Description of Artificial Sequence: Synthetic polypeptide
APTSSSTKKTQLQLEHLLLDLQMILNGINNYKNPKLTRMLTFKFYMPKKATELKHLQCLEEELKPLEEALNLAPSKNFHLRPRDLISDINVIVLELKGSETTFMCEYADETATIVEFLNRWITFSQSIISTLTGGGGSGGGGSGGGGSGGGGSDKTHTCPPCPAPEAAGAPSVFLFPPKPKDTLMISRTPEVTCVVVDVSHEDPEVKFNWYVDGVEVHNAKTKPREEQYNSTYRVVSVLTVLHQDWLNGKEYKCKVSNKALPAPIEKTISKAKGQPREPQVYTLPPSREEMTKNQVSLTCLVKGFYPSDIAVEWESNGQPENNYKTTPPVLDSDGSFFLYSKLTVDKSRWQQGNVFSCSVMHEALHNHYTQKSLSLSPG

SEQ ID NO: 58 - protein, 364 aa, Artificial Sequence
  Description of Artificial Sequence: Synthetic polypeptide
DKTHTCPPCPAPELLGGPSVFLFPPKPKDTLMISRTPEVTCVVVDVSHEDPEVKFNWYVDGVEVHNAKTKPREEQYGSTYRVVSVLTVLHQDWLNGKEYKCKVSNKALPAPIEKTISKAKGQPREPQVYTLPPSREEMTKNQVSLTCLVKGFYPSDIAVEWESNGQPENNYKTTPPVLDSDGSFFLYSKLTVDKSRWQQGNVFSCSVMHEALHNHYTQKSLSLSPGGGGGSAPTSSSTKKTQLQLEHLLLDLQMILNGINNYKNPKLTRMLTFKFYMPKKATELKHLQCLEEELKPLEEALNLAPSKNFHLRPRDLISDINVIVLELKGSETTFMCEYADETATIVEFLNRWITFAQSIISTLT

SEQ ID NO: 59 - protein, 379 aa, Artificial Sequence
  Description of Artificial Sequence: Synthetic polypeptide
  MOD_RES (53)..(53): L or I
  MOD_RES (56)..(56): L or I
  MOD_RES (80)..(80): L or I
  MOD_RES (118)..(118): L or I
  See specification as filed for detailed description of substitutions and preferred embodiments
APTSSSTKKTQLQLEHLLLDLQMILNGINNYKNPKLTRMLTFKFYMPKKATEXKHXQCLEEELKPLEEALNLAPSKNFHXRPRDLISDINVIVLELKGSETTFMCEYADETATIVEFXNRWITFSQSIISTLTGGGGSGGGGSGGGGSGGGGSDKTHTCPPCPAPEAAGAPSVFLFPPKPKDTLMISRTPEVTCVVVDVSHEDPEVKFNWYVDGVEVHNAKTKPREEQYNSTYRVVSVLTVLHQDWLNGKEYKCKVSNKALPAPIEKTISKAKGQPREPQVYTLPPSREEMTKNQVSLTCLVKGFYPSDIAVEWESNGQPENNYKTTPPVLDSDGSFFLYSKLTVDKSRWQQGNVFSCSVMHEALHNHYTQKSLSLSPG

SEQ ID NO: 60 - protein, 133 aa, Artificial Sequence
  Description of Artificial Sequence: Synthetic polypeptide
  MOD_RES (53)..(53): L or I
  MOD_RES (56)..(56): L or I
  MOD_RES (80)..(80): L or I
  MOD_RES (118)..(118): L or I
  See specification as filed for detailed description of substitutions and preferred embodiments
APTSSSTKKTQLQLEHLLLDLQMILNGINNYKNPKLTRMLTFKFYMPKKATEXKHXQCLEEELKPLEEALNLAPSKNFHXRPRDLISDINVIVLELKGSETTFMCEYADETATIVEFXNRWITFSQSIISTLT

SEQ ID NO: 61 - protein, 9 aa, Artificial Sequence
  Description of Artificial Sequence: Synthetic peptide
FTFSSYGMH

SEQ ID NO: 62 - protein, 13 aa, Artificial Sequence
  Description of Artificial Sequence: Synthetic peptide
AVISDDGSDKYYA

SEQ ID NO: 63 - protein, 15 aa, Artificial Sequence
  Description of Artificial Sequence: Synthetic peptide
CTTSKYYYYYGMDVW

SEQ ID NO: 64 - protein, 11 aa, Artificial Sequence
  Description of Artificial Sequence: Synthetic peptide
QASQDISKSLN

SEQ ID NO: 65 - protein, 7 aa, Artificial Sequence
  Description of Artificial Sequence: Synthetic peptide
AASSLQS

SEQ ID NO: 66 - protein, 11 aa, Artificial Sequence [sequence omitted]

SEQ ID NO: 67 - protein, 247 aa, Artificial Sequence
  Description of Artificial Sequence: Synthetic polypeptide
EVQLLESGGGLVQPGGSLRLSCAASGFTFSSYGMHWVRQAPGKGLEWVAVISDDGSDKYYADSVKGRFTISRDNSKNTLYLQMNSLRAEDTAVYYCTTSKYYYYYGMDVWGQGTTVTVSSGGGGSGGGGSGGGGSGGGGSDIQMTQSPSSLSASVGDRVTITCQASQDISKSLNWYQQKPGKAPKLLIYAASSLQSGVPSRFSGSGSGTDFTLTISSLQPEDFATYYCQQGYSTPLTFGGGTKVEIK

SEQ ID NO: 68 - protein, 9 aa, Artificial Sequence
  Description of Artificial Sequence: Synthetic peptide
YPFIGYYLH

SEQ ID NO: 69 - protein, 13 aa, Artificial Sequence
  Description of Artificial Sequence: Synthetic peptide
GIINPSGGSTSYA

SEQ ID NO: 70 - protein, 14 aa, Artificial Sequence
  Description of Artificial Sequence: Synthetic peptide
CAREGRLSYGMDAW

SEQ ID NO: 71 - protein, 11 aa, Artificial Sequence
  Description of Artificial Sequence: Synthetic peptide
RASQSISSYLA

SEQ ID NO: 72 - protein, 7 aa, Artificial Sequence
  Description of Artificial Sequence: Synthetic peptide
GASTLES

SEQ ID NO: 73 - protein, 11 aa, Artificial Sequence
  Description of Artificial Sequence: Synthetic peptide
CQQTWGPPFTF

SEQ ID NO: 74 - protein, 246 aa, Artificial Sequence
  Description of Artificial Sequence: Synthetic polypeptide
QVQLVQSGAEVKKPGASVKVSCKASGYPFIGYYLHWVRQAPGQGLEWMGIINPSGGSTSYAQKFQGRVTMTRDTSTSTVYMELSSLRSEDTAVYYCAREGRLSYGMDAWGQGTLVTVSSGGGGSGGGGSGGGGSGGGGSDIQMTQSPSSLSASVGDRVTITCRASQSISSYLAWYQQKPGKAPKLLIYGASTLESGVPSRFSGSGSGTDFTLTISSLQPEDFATYYCQQTWGPPFTFGQGTKLEIK

SEQ ID NO: 75 - protein, 9 aa, Artificial Sequence
  Description of Artificial Sequence: Synthetic peptide
YPFIGQYLH

SEQ ID NO: 76 - protein, 246 aa, Artificial Sequence
  Description of Artificial Sequence: Synthetic polypeptide
QVQLVQSGAEVKKPGASVKVSCKASGYPFIGQYLHWVRQAPGQGLEWMGIINPSGGSTSYAQKFQGRVTMTRDTSTSTVYMELSSLRSEDTAVYYCAREGRLSYGMDAWGQGTLVTVSSGGGGSGGGGSGGGGSGGGGSDIQMTQSPSSLSASVGDRVTITCRASQSISSYLAWYQQKPGKAPKLLIYGASTLESGVPSRFSGSGSGTDFTLTISSLQPEDFATYYCQQTWGPPFTFGQGTKLEIK

SEQ ID NO: 77 - protein, 9 aa, Artificial Sequence
  Description of Artificial Sequence: Synthetic peptide
GTFSSYAIS

SEQ ID NO: 78 - protein, 13 aa, Artificial Sequence
  Description of Artificial Sequence: Synthetic peptide
GSINPSGDTTSYA

SEQ ID NO: 79 - protein, 16 aa, Artificial Sequence
  Description of Artificial Sequence: Synthetic peptide
CAKDKAQWLVGYFDYW

SEQ ID NO: 80 - protein, 11 aa, Artificial Sequence
  Description of Artificial Sequence: Synthetic peptide
QASQDISNSLN

SEQ ID NO: 81 - protein, 11 aa, Artificial Sequence
  Description of Artificial Sequence: Synthetic peptide
CQQSYSSVITF

SEQ ID NO: 82 - protein, 248 aa, Artificial Sequence
  Description of Artificial Sequence: Synthetic polypeptide
QVQLVQSGAEVKKPGASVKVSCKASGGTFSSYAISWVRQAPGQGLEWMGSINPSGDTTSYAQKFQGRVTMTRDTSTSTVYMELSSLRSEDTAVYYCAKDKAQWLVGYFDYWGQGTLVTVSSGGGGSGGGGSGGGGSGGGGSDIQMTQSPSSLSASVGDRVTITCQASQDISNSLNWYQQKPGKAPKLLIYAASSLQSGVPSRFSGSGSGTDFTLTISSLQPEDFATYYCQQSYSSVITFGQGTKVEIK

SEQ ID NO: 83 - protein, 9 aa, Artificial Sequence
  Description of Artificial Sequence: Synthetic peptide
FTFSSYWMH

SEQ ID NO: 84 - protein, 13 aa, Artificial Sequence
  Description of Artificial Sequence: Synthetic peptide
SSISPGGSNIDYA

SEQ ID NO: 85 - protein, 13 aa, Artificial Sequence
  Description of Artificial Sequence: Synthetic peptide
CAREVQLSHYDYW

SEQ ID NO: 86 - protein, 11 aa, Artificial Sequence
  Description of Artificial Sequence: Synthetic peptide
RASQGISNSLA

SEQ ID NO: 87 - protein, 7 aa, Artificial Sequence
  Description of Artificial Sequence: Synthetic peptide
GASSLQS

SEQ ID NO: 88 - protein, 11 aa, Artificial Sequence [sequence omitted]

SEQ ID NO: 89 - protein, 245 aa, Artificial Sequence
  Description of Artificial Sequence: Synthetic polypeptide
EVQLLESGGGLVQPGGSLRLSCAASGFTFSSYWMHWVRQAPGKGLEWVSSISPGGSNIDYADSVKGRFTISRDNSKNTLYLQMNSLRAEDTAVYYCAREVQLSHYDYWGQGTLVTVSSGGGGSGGGGSGGGGSGGGGSDIQMTQSPSSLSASVGDRVTITCRASQGISNSLAWYQQKPGKAPKLLIYGASSLQSGVPSRFSGSGSGTDFTLTISSLQPEDFATYYCQQANSFPFTFGQGTKVEIK

SEQ ID NO: 90 - protein, 9 aa, Artificial Sequence
  Description of Artificial Sequence: Synthetic peptide
FTFNNYAFH

SEQ ID NO: 91 - protein, 13 aa, Artificial Sequence
  Description of Artificial Sequence: Synthetic peptide
SRINSYGTSTTYA

SEQ ID NO: 92 - protein, 16 aa, Artificial Sequence
  Description of Artificial Sequence: Synthetic peptide
CAREGPVAGYWYFDLW

SEQ ID NO: 93 - protein, 11 aa, Artificial Sequence
  Description of Artificial Sequence: Synthetic peptide
RASQIIGTNLA

SEQ ID NO: 94 - protein, 11 aa, Artificial Sequence [sequence omitted]

SEQ ID NO: 95 - protein, 248 aa, Artificial Sequence
  Description of Artificial Sequence: Synthetic polypeptide
EVQLLESGGGLVQPGGSLRLSCAASGFTFNNYAFHWVRQAPGKGLEWVSRINSYGTSTTYADSVKGRFTISRDNSKNTLYLQMNSLRAEDTAVYYCAREGPVAGYWYFDLWGQGTLVTVSSGGGGSGGGGSGGGGSGGGGSDIQMTQSPSSLSASVGDRVTITCRASQIIGTNLAWYQQKPGKAPKLLIYGASSLQSGVPSRFSGSGSGTDFTLTISSLQPEDFATYYCQQSYRLPFTFGQGTKVEIK

SEQ ID NO: 96 - protein, 9 aa, Artificial Sequence
  Description of Artificial Sequence: Synthetic peptide
YTFTGYHIH

SEQ ID NO: 97 - protein, 13 aa, Artificial Sequence
  Description of Artificial Sequence: Synthetic peptide
GIINPSGGSTIYA

SEQ ID NO: 98 - protein, 16 aa, Artificial Sequence
  Description of Artificial Sequence: Synthetic peptide
CAKDWSSWYLGPFDYW

SEQ ID NO: 99 - protein, 11 aa, Artificial Sequence
  Description of Artificial Sequence: Synthetic peptide
RASQNISSSLN

SEQ ID NO: 100 - protein, 11 aa, Artificial Sequence [sequence omitted]

SEQ ID NO: 101 - protein, 248 aa, Artificial Sequence
  Description of Artificial Sequence: Synthetic polypeptide
QVQLVQSGAEVKKPGASVKVSCKASGYTFTGYHIHWVRQAPGQGLEWMGIINPSGGSTIYAQKFQGRVTMTRDTSTSTVYMELSSLRSEDTAVYYCAKDWSSWYLGPFDYWGQGTLVTVSSGGGGSGGGGSGGGGSGGGGSDIQMTQSPSSLSASVGDRVTITCRASQNISSSLNWYQQKPGKAPKLLIYAASSLQSGVPSRFSGSGSGTDFTLTISSLQPEDFATYYCQQSYTTPYTFGQGTKVEIK

SEQ ID NO: 102 - protein, 9 aa, Artificial Sequence
  Description of Artificial Sequence: Synthetic peptide
FMFGDYAMH

SEQ ID NO: 103 - protein, 13 aa, Artificial Sequence
  Description of Artificial Sequence: Synthetic peptide
SAISGSGGSTYYA

SEQ ID NO: 104 - protein, 16 aa, Artificial Sequence
  Description of Artificial Sequence: Synthetic peptide
CAKDLVVAGIWYFDLW

SEQ ID NO: 105 - protein, 11 aa, Artificial Sequence
  Description of Artificial Sequence: Synthetic peptide
RASQGISNNLN

SEQ ID NO: 106 - protein, 7 aa, Artificial Sequence
  Description of Artificial Sequence: Synthetic peptide
DASSLES

SEQ ID NO: 107 - protein, 11 aa, Artificial Sequence [sequence omitted]

SEQ ID NO: 108 - protein, 248 aa, Artificial Sequence
  Description of Artificial Sequence: Synthetic polypeptide
EVQLLESGGGLVQPGGSLRLSCAASGFMFGDYAMHWVRQAPGKGLEWVSAISGSGGSTYYADSVKGRFTISRDNSKNTLYLQMNSLRAEDTAVYYCAKDLVVAGIWYFDLWGRGTLVTVSSGGGGSGGGGSGGGGSGGGGSDIQMTQSPSSLSASVGDRVTITCRASQGISNNLNWYQQKPGKAPKLLIYDASSLESGVPSRFSGSGSGTDFTLTISSLQPEDFATYYCQQTHSFPSTFGQGTKLEIK

SEQ ID NO: 109 - protein, 9 aa, Artificial Sequence
  Description of Artificial Sequence: Synthetic peptide
FTFSDYYMN

SEQ ID NO: 110 - protein, 13 aa, Artificial Sequence
  Description of Artificial Sequence: Synthetic peptide
SVIGESGGSTYYA

SEQ ID NO: 111 - protein, 18 aa, Artificial Sequence
  Description of Artificial Sequence: Synthetic peptide
CAADPVSRWPKHGGGDYW

SEQ ID NO: 112 - protein, 11 aa, Artificial Sequence
  Description of Artificial Sequence: Synthetic peptide
RASQGISSSLA

SEQ ID NO: 113 - protein, 7 aa, Artificial Sequence
  Description of Artificial Sequence: Synthetic peptide
AASTLQS

SEQ ID NO: 114 - protein, 11 aa, Artificial Sequence [sequence omitted]

SEQ ID NO: 115 - protein, 250 aa, Artificial Sequence
  Description of Artificial Sequence: Synthetic polypeptide
EVQLLESGGGLVQPGGSLRLSCAASGFTFSDYYMNWVRQAPGKGLEWVSVIGESGGSTYYADSVKGRFTISRDNSKNTLYLQMNSLRAEDTAVYYCAADPVSRWPKHGGGDYWGQGTLVTVSSGGGGSGGGGSGGGGSGGGGSDIQMTQSPSSLSASVGDRVTITCRASQGISSSLAWYQQKPGKAPKLLIYAASTLQSGVPSRFSGSGSGTDFTLTISSLQPEDFATYYCQQSYSTPWTFGQGTKVEIK

SEQ ID NO: 116 - protein, 9 aa, Artificial Sequence
  Description of Artificial Sequence: Synthetic peptide
YTLTTWYMY

SEQ ID NO: 117 - protein, 13 aa, Artificial Sequence
  Description of Artificial Sequence: Synthetic peptide
GWINPNRGATNYA

SEQ ID NO: 118 - protein, 13 aa, Artificial Sequence
  Description of Artificial Sequence: Synthetic peptide
CAKGDLWGAMDVW

SEQ ID NO: 119 - protein, 11 aa, Artificial Sequence
  Description of Artificial Sequence: Synthetic peptide
RASDNIGSWLA

SEQ ID NO: 120 - protein, 11 aa, Artificial Sequence [sequence omitted]

SEQ ID NO: 121 - protein, 245 aa, Artificial Sequence
  Description of Artificial Sequence: Synthetic polypeptide
QVQLVQSGAEVKKPGASVKVSCKASGYTLTTWYMYWVRQAPGQGLEWMGWINPNRGATNYAQKFQGRVTMTRDTSTSTVYMELSSLRSEDTAVYYCAKGDLWGAMDVWGQGTLVTVSSGGGGSGGGGSGGGGSGGGGSDIQMTQSPSSLSASVGDRVTITCRASDNIGSWLAWYQQKPGKAPKLLIYAASSLQSGVPSRFSGSGSGTDFTLTISSLQPEDFATYYCQQGYSTPPTFGQGTKVEIK

SEQ ID NO: 122 - protein, 9 aa, Artificial Sequence
  Description of Artificial Sequence: Synthetic peptide
YTFTTYYMH

SEQ ID NO: 123 - protein, 13 aa, Artificial Sequence
  Description of Artificial Sequence: Synthetic peptide
GGFDPEDGETIYA

SEQ ID NO: 124 - protein, 22 aa, Artificial Sequence
  Description of Artificial Sequence: Synthetic peptide
CARHAVAGAVGAGYYYYGMDVW

SEQ ID NO: 125 - protein, 11 aa, Artificial Sequence
  Description of Artificial Sequence: Synthetic peptide
RASESISNWLA

SEQ ID NO: 126 - protein, 11 aa, Artificial Sequence [sequence omitted]

SEQ ID NO: 127 - protein, 254 aa, Artificial Sequence
  Description of Artificial Sequence: Synthetic polypeptide
QVQLVQSGAEVKKPGASVKVSCKASGYTFTTYYMHWVRQAPGQGLEWMGGFDPEDGETIYAQKFQGRVTMTRDTSTSTVYMELSSLRSEDTAVYYCARHAVAGAVGAGYYYYGMDVWGQGTMVTVSSGGGGSGGGGSGGGGSGGGGSDIQMTQSPSSLSASVGDRVTITCRASESISNWLAWYQQKPGKAPKLLIYAASTLQSGVPSRFSGSGSGTDFTLTISSLQPEDFATYYCQQSYSVPFTFGPGTKVDIK

SEQ ID NO: 128 - protein, 9 aa, Artificial Sequence
  Description of Artificial Sequence: Synthetic peptide
YTFTGYYMH

SEQ ID NO: 129 - protein, 13 aa, Artificial Sequence
  Description of Artificial Sequence: Synthetic peptide
GWIGPNSGDTNYA

SEQ ID NO: 130 - protein, 14 aa, Artificial Sequence
  Description of Artificial Sequence: Synthetic peptide
CARDLDHNWYFDLW

SEQ ID NO: 131 - protein, 16 aa, Artificial Sequence
  Description of Artificial Sequence: Synthetic peptide
RSSQSLLHSNGYNYLD

SEQ ID NO: 132 - protein, 7 aa, Artificial Sequence
  Description of Artificial Sequence: Synthetic peptide
SSSNRAP

SEQ ID NO: 133 - protein, 11 aa, Artificial Sequence [sequence omitted]

SEQ ID NO: 134 - protein, 251 aa, Artificial Sequence
  Description of Artificial Sequence: Synthetic polypeptide
QVQLVQSGAEVKKPGASVKVSCKASGYTFTGYYMHWVRQAPGQGLEWMGWIGPNSGDTNYAQKFQGRVTMTRDTSTSTVYMELSSLRSEDTAVYYCARDLDHNWYFDLWGRGTLVTVSSGGGGSGGGGSGGGGSGGGGSDIVMTQSPLSLPVTPGEPASISCRSSQSLLHSNGYNYLDWYLQKPGQSPQLLIYSSSNRAPGVPDRFSGSGSGTDFTLKISRVEAEDVGVYYCMQALHIPLTFGGGTKVEIK

SEQ ID NO: 135 - protein, 9 aa, Artificial Sequence
  Description of Artificial Sequence: Synthetic peptide
FTFDDYAMH

SEQ ID NO: 136 - protein, 13 aa, Artificial Sequence
  Description of Artificial Sequence: Synthetic peptide
SYIDASGTTIYYA

SEQ ID NO: 137 - protein, 16 aa, Artificial Sequence
  Description of Artificial Sequence: Synthetic peptide
CAKDQAAAGYWYFDLW

SEQ ID NO: 138 - protein, 11 aa, Artificial Sequence
  Description of Artificial Sequence: Synthetic peptide
QASQDISNYLN

SEQ ID NO: 139 - protein, 7 aa, Artificial Sequence
  Description of Artificial Sequence: Synthetic peptide
KASTLES

SEQ ID NO: 140 - protein, 11 aa, Artificial Sequence [sequence omitted]

SEQ ID NO: 141 - protein, 248 aa, Artificial Sequence
  Description of Artificial Sequence: Synthetic polypeptide
EVQLLESGGGLVQPGGSLRLSCAASGFTFDDYAMHWVRQAPGKGLEWVSYIDASGTTIYYADSVKGRFTISRDNSKNTLYLQMNSLRAEDTAVYYCAKDQAAAGYWYFDLWGRGTLVTVSSGGGGSGGGGSGGGGSGGGGSDIQMTQSPSSLSASVGDRVTITCQASQDISNYLNWYQQKPGKAPKLLIYKASTLESGVPSRFSGSGSGTDFTLTISSLQPEDFATYYCQQSYSTPITFGQGTRLEIK

SEQ ID NO: 142 - protein, 9 aa, Artificial Sequence
  Description of Artificial Sequence: Synthetic peptide
YTFTDYHIH

SEQ ID NO: 143 - protein, 13 aa, Artificial Sequence
  Description of Artificial Sequence: Synthetic peptide
GGIVPRSGSTTYA

SEQ ID NO: 144 - protein, 15 aa, Artificial Sequence
  Description of Artificial Sequence: Synthetic peptide
CAKDESSGWYYFDYW

SEQ ID NO: 145 - protein, 7 aa, Artificial Sequence
  Description of Artificial Sequence: Synthetic peptide
SAYNRAS

SEQ ID NO: 146 - protein, 11 aa, Artificial Sequence [sequence omitted]

SEQ ID NO: 147 - protein, 252 aa, Artificial Sequence
  Description of Artificial Sequence: Synthetic polypeptide
QVQLVQSGAEVKKPGSSVKVSCKASGYTFTDYHIHWVRQAPGQGLEWMGGIVPRSGSTTYAQKFQGRVTITADESTSTAYMELSSLRSEDTAVYYCAKDESSGWYYFDYWGQGTLVTVSSGGGGSGGGGSGGGGSGGGGSDIVMTQSPLSLPVTPGEPASISCRSSQSLLHSNGYNYLDWYLQKPGQSPQLLIYSAYNRASGVPDRFSGSGSGTDFTLKISRVEAEDVGVYYCMQALQTPLTFGQGTKVEIK

SEQ ID NO: 148 - protein, 9 aa, Artificial Sequence
  Description of Artificial Sequence: Synthetic peptide
YTFTNYYMH

SEQ ID NO: 149 - protein, 13 aa, Artificial Sequence
  Description of Artificial Sequence: Synthetic peptide
GGIIPIVDRVKYA

SEQ ID NO: 150 - protein, 17 aa, Artificial Sequence
  Description of Artificial Sequence: Synthetic peptide
CAKGRYTVNYYYGMDVW

SEQ ID NO: 151 - protein, 11 aa, Artificial Sequence
  Description of Artificial Sequence: Synthetic peptide
QANQDISNYLN

SEQ ID NO: 152 - protein, 7 aa, Artificial Sequence
  Description of Artificial Sequence: Synthetic peptide
RASKLEA

SEQ ID NO: 153 - protein, 11 aa, Artificial Sequence
  Description of Artificial Sequence: Synthetic peptide
CQQSSEIPYSF

SEQ ID NO: 154 - protein, 249 aa, Artificial Sequence
  Description of Artificial Sequence: Synthetic polypeptide
QVQLVQSGAEVKKPGSSVKVSCKASGYTFTNYYMHWVRQAPGQGLEWMGGIIPIVDRVKYAQKFQGRVTITADESTSTAYMELSSLRSEDTAVYYCAKGRYTVNYYYGMDVWGQGTTVTVSSGGGGSGGGGSGGGGSGGGGSDIQMTQSPSSLSASVGDRVTITCQANQDISNYLNWYQQKPGKAPKLLIYRASKLEAGVPSRFSGSGSGTDFTLTISSLQPEDFATYYCQQSSEIPYSFGQGTKLEIK

SEQ ID NO: 155 - protein, 9 aa, Artificial Sequence
  Description of Artificial Sequence: Synthetic peptide
FTFEDYAMH

SEQ ID NO: 156 - protein, 13 aa, Artificial Sequence
  Description of Artificial Sequence: Synthetic peptide
SYLNSDGGSTSYA

SEQ ID NO: 157 - protein, 16 aa, Artificial Sequence
  Description of Artificial Sequence: Synthetic peptide
CAKDYCTNGVCAFDYW

SEQ ID NO: 158 - protein, 11 aa, Artificial Sequence
  Description of Artificial Sequence: Synthetic peptide
RASQSISTYLN

SEQ ID NO: 159 - protein, 7 aa, Artificial Sequence
  Description of Artificial Sequence: Synthetic peptide
DASNLET

SEQ ID NO: 160 - protein, 11 aa, Artificial Sequence [sequence omitted]

SEQ ID NO: 161 - protein, 248 aa, Artificial Sequence
  Description of Artificial Sequence: Synthetic polypeptide
EVQLLESGGGLVQPGGSLRLSCAASGFTFEDYAMHWVRQAPGKGLEWVSYLNSDGGSTSYADSVKGRFTISRDNSKNTLYLQMNSLRAEDTAVYYCAKDYCTNGVCAFDYWGQGTLVTVSSGGGGSGGGGSGGGGSGGGGSDIQMTQSPSSLSASVGDRVTITCRASQSISTYLNWYQQKPGKAPKLLIYDASNLETGVPSRFSGSGSGTDFTLTISSLQPEDFATYYCQQSYTIPITFGQGTRLEIK

SEQ ID NO: 162 - protein, 9 aa, Artificial Sequence
  Description of Artificial Sequence: Synthetic peptide
FTFSDSAMH

SEQ ID NO: 163 - protein, 13 aa, Artificial Sequence
  Description of Artificial Sequence: Synthetic peptide
SAISGSGSTIYYA

SEQ ID NO: 164 - protein, 16 aa, Artificial Sequence
  Description of Artificial Sequence: Synthetic peptide
CVSDIAVAGHWYFDLW

SEQ ID NO: 165 - protein, 11 aa, Artificial Sequence
  Description of Artificial Sequence: Synthetic peptide
RASQSISTFLN

SEQ ID NO: 166 - protein, 7 aa, Artificial Sequence
  Description of Artificial Sequence: Synthetic peptide
AASRLEG

SEQ ID NO: 167 - protein, 11 aa, Artificial Sequence [sequence omitted]

SEQ ID NO: 168 - protein, 248 aa, Artificial Sequence
  Description of Artificial Sequence: Synthetic polypeptide
EVQLLESGGGLVQPGGSLRLSCAASGFTFSDSAMHWVRQAPGKGLEWVSAISGSGSTIYYADSVKGRFTISRDNSKNTLYLQMNSLRAEDTAVYYCVSDIAVAGHWYFDLWGRGTLVTVSSGGGGSGGGGSGGGGSGGGGSDIQMTQSPSSLSASVGDRVTITCRASQSISTFLNWYQQKPGKAPKLLIYAASRLEGGVPSRFSGSGSGTDFTLTISSLQPEDFATYYCQQANSFPLTFGPGTKVDIK

SEQ ID NO: 169 - protein, 9 aa, Artificial Sequence
  Description of Artificial Sequence: Synthetic peptide
FTFSSYWMS

SEQ ID NO: 170 - protein, 13 aa, Artificial Sequence
  Description of Artificial Sequence: Synthetic peptide
SYISGDSGYTNYA

SEQ ID NO: 171 - protein, 17 aa, Artificial Sequence
  Description of Artificial Sequence: Synthetic peptide
CARANSSGWYDWYFDLW

SEQ ID NO: 172 - protein, 11 aa, Artificial Sequence
  Description of Artificial Sequence: Synthetic peptide
RASQSISSYLN

SEQ ID NO: 173 - protein, 11 aa, Artificial Sequence [sequence omitted]

SEQ ID NO: 174 - protein, 249 aa, Artificial Sequence
  Description of Artificial Sequence: Synthetic polypeptide
EVQLVESGGGLVKPGGSLRLSCAASGFTFSSYWMSWVRQAPGKGLEWVSYISGDSGYTNYAAPVKGRFTISRDDSKNTLYLQMNSLKTEDTAVYYCARANSSGWYDWYFDLWGRGTLVTVSSGGGGSGGGGSGGGGSGGGGSDIQMTQSPSSLSASVGDRVTITCRASQSISSYLNWYQQKPGKAPKLLIYAASSLQSGVPSRFSGSGSGTDFTLTISSLQPEDFATYYCQQSYSTPLTFGGGTKVEIK

SEQ ID NO: 175 - protein, 13 aa, Artificial Sequence
  Description of Artificial Sequence: Synthetic peptide
SGISWNSGSIGYA

SEQ ID NO: 176 - protein, 18 aa, Artificial Sequence
  Description of Artificial Sequence: Synthetic peptide
CAKDIVAAGHYYYGMDVW

SEQ ID NO: 177 - protein, 250 aa, Artificial Sequence
  Description of Artificial Sequence: Synthetic polypeptide
EVQLLESGGGLVQPGGSLRLSCAASGFTFDDYAMHWVRQAPGKGLEWVSGISWNSGSIGYADSVKGRFTISRDNSKNTLYLQMNSLRAEDTAVYYCAKDIVAAGHYYYGMDVWGQGTTVTVSSGGGGSGGGGSGGGGSGGGGSDIQMTQSPSSLSASVGDRVTITCQASQDISNYLNWYQQKPGKAPKLLIYDASNLETGVPSRFSGSGSGTDFTLTISSLQPEDFATYYCQQSYSTPLTFGGGTKVEIK

SEQ ID NO: 178 - protein, 13 aa, Artificial Sequence
  Description of Artificial Sequence: Synthetic peptide
SYIDTSSSHLYYA

SEQ ID NO: 179 - protein, 16 aa, Artificial Sequence
  Description of Artificial Sequence: Synthetic peptide
CARDEAAAGYYGMDVW

SEQ ID NO: 180 - protein, 11 aa, Artificial Sequence
  Description of Artificial Sequence: Synthetic peptide
QAGQDISNYLN

SEQ ID NO: 181 - protein, 11 aa, Artificial Sequence [sequence omitted]

SEQ ID NO: 182 - protein, 248 aa, Artificial Sequence
  Description of Artificial Sequence: Synthetic polypeptide
EVQLLESGGGLVQPGGSLRLSCAASGFTFDDYAMHWVRQAPGKGLEWVSYIDTSSSHLYYADSVKGRFTISRDNSKNTLYLQMNSLRAEDTAVYYCARDEAAAGYYGMDVWGQGTTVTVSSGGGGSGGGGSGGGGSGGGGSDIQMTQSPSSLSASVGDRVTITCQAGQDISNYLNWYQQKPGKAPKLLIYDASNLETGVPSRFSGSGSGTDFTLTISSLQPEDFATYYCQQTYSTPITFGQGTKLEIK

SEQ ID NO: 183 - protein, 9 aa, Artificial Sequence
  Description of Artificial Sequence: Synthetic peptide
FTFSNAWMS

SEQ ID NO: 184 - protein, 13 aa, Artificial Sequence
  Description of Artificial Sequence: Synthetic peptide
STIVGNGGATYYA

SEQ ID NO: 185 - protein, 15 aa, Artificial Sequence
  Description of Artificial Sequence: Synthetic peptide
CARDNPLRWQGMDVW

SEQ ID NO: 186 - protein, 11 aa, Artificial Sequence
  Description of Artificial Sequence: Synthetic peptide
RASQDISNYLN

SEQ ID NO: 187 - protein, 11 aa, Artificial Sequence [sequence omitted]

SEQ ID NO: 188 - protein, 247 aa, Artificial Sequence
  Description of Artificial Sequence: Synthetic polypeptide
EVQLLESGGGLVQPGGSLRLSCAASGFTFSNAWMSWVRQAPGKGLEWVSTIVGNGGATYYADSVKGRFTISRDNSKNTLYLQMNSLRAEDTAVYYCARDNPLRWQGMDVWGQGTLVTVSSGGGGSGGGGSGGGGSGGGGSDIQMTQSPSSLSASVGDRVTITCRASQDISNYLNWYQQKPGKAPKLLIYAASSLQSGVPSRFSGSGSGTDFTLTISSLQPEDFATYYCQQSYSIPPTFGPGTKVDIK

SEQ ID NO: 189 - protein, 9 aa, Artificial Sequence
  Description of Artificial Sequence: Synthetic peptide
FTFSSYQMS

SEQ ID NO: 190 - protein, 13 aa, Artificial Sequence
  Description of Artificial Sequence: Synthetic peptide
SYISSSSTYTNYA

SEQ ID NO: 191 - protein, 17 aa, Artificial Sequence
  Description of Artificial Sequence: Synthetic peptide
CARANSSSWYDWYFDLW

SEQ ID NO: 192 - protein, 249 aa, Artificial Sequence
  Description of Artificial Sequence: Synthetic polypeptide
EVQLLESGGGLVQPGGSLRLSCAASGFTFSSYQMSWVRQAPGKGLEWVSYISSSSTYTNYADSVKGRFTISRDNSKNTLYLQMNSLRAEDTAVYYCARANSSSWYDWYFDLWGQGTLVTVSSGGGGSGGGGSGGGGSGGGGSDIQMTQSPSSLSASVGDRVTITCRASQSISSYLNWYQQKPGKAPKLLIYAASSLQSGVPSRFSGSGSGTDFTLTISSLQPEDFATYYCQQSYSTPLTFGGGTKVEIK

SEQ ID NO: 193 - protein, 9 aa, Artificial Sequence
  Description of Artificial Sequence: Synthetic peptide
FTFSSYAMH

SEQ ID NO: 194 - protein, 13 aa, Artificial Sequence
  Description of Artificial Sequence: Synthetic peptide
SGISGSGGSAYYA

SEQ ID NO: 195 - protein, 18 aa, Artificial Sequence
  Description of Artificial Sequence: Synthetic peptide
CATSQAPVDYYYYGMDVW

SEQ ID NO: 196 - protein, 11 aa, Artificial Sequence
  Description of Artificial Sequence: Synthetic peptide
RASQSISSWLA

SEQ ID NO: 197 - protein, 7 aa, Artificial Sequence
  Description of Artificial Sequence: Synthetic peptide
AASNLQR

SEQ ID NO: 198 - protein, 11 aa, Artificial Sequence [sequence omitted]

SEQ ID NO: 199 - protein, 250 aa, Artificial Sequence
  Description of Artificial Sequence: Synthetic polypeptide
EVQLLESGGGLVQPGGSLRLSCAASGFTFSSYAMHWVRQAPGKGLEWVSGISGSGGSAYYADSVKGRFTISRDNSKNTLYLQMNSLRAEDTAVYYCATSQAPVDYYYYGMDVWGQGTTVTVSSGGGGSGGGGSGGGGSGGGGSDIQMTQSPSSLSASVGDRVTITCRASQSISSWLAWYQQKPGKAPKLLIYAASNLQRGVPSRFSGSGSGTDFTLTISSLQPEDFATYYCQQSYSIPITFGQGTKVEIK

SEQ ID NO: 200 - protein, 13 aa, Artificial Sequence
  Description of Artificial Sequence: Synthetic peptide
SYISGSSSYTNYA

SEQ ID NO: 201 - protein, 17 aa, Artificial Sequence
  Description of Artificial Sequence: Synthetic peptide
CARVGSSGWYDWYFDLW

SEQ ID NO: 202 - protein, 249 aa, Artificial Sequence
  Description of Artificial Sequence: Synthetic polypeptide
EVQLVESGGGLVKPGGSLRLSCAASGFTFSSYWMSWVRQAPGKGLEWVSYISGSSSYTNYAAPVKGRFTISRDDSKNTLYLQMNSLKTEDTAVYYCARVGSSGWYDWYFDLWGRGTLVTVSSGGGGSGGGGSGGGGSGGGGSDIQMTQSPSSLSASVGDRVTITCRASQSISSYLNWYQQKPGKAPKLLIYAASSLQSGVPSRFSGSGSGTDFTLTISSLQPEDFATYYCQQSYSTPLTFGQGTKVEIK

SEQ ID NO: 203 - protein, 245 aa, Artificial Sequence
  Description of Artificial Sequence: Synthetic polypeptide
QVQLVQSGAEVKKPGASVKVSCKASGYTLTTWYMYWVRQAPGQGLEWMGWINPNRGATNYAQKFQGRVTMTRDTSTSTVYMELSSLRSEDTAVYYCAKGDLWGAMDVWGQGTTVTVSSGGGGSGGGGSGGGGSGGGGSDIQMTQSPSSLSASVGDRVTITCRASDNIGSWLAWYQQKPGKAPKLLIYAASSLQSGVPSRFSGSGSGTDFTLTISSLQPEDFATYYCQQGYSTPPTFGQGTKVEIK

SEQ ID NO: 204 - protein, 9 aa, Artificial Sequence
  Description of Artificial Sequence: Synthetic peptide
YTFTGYYIH

SEQ ID NO: 205 - protein, 13 aa, Artificial Sequence
  Description of Artificial Sequence: Synthetic peptide
GWMNPNSGNTGYA

SEQ ID NO: 206 - protein, 24 aa, Artificial Sequence
  Description of Artificial Sequence: Synthetic peptide
CARDPGFLGYCSGGSCYDGWFDPW

SEQ ID NO: 207 - protein, 11 aa, Artificial Sequence
  Description of Artificial Sequence: Synthetic peptide
RASQSISSYLH

SEQ ID NO: 208 - protein, 11 aa, Artificial Sequence [sequence omitted]

SEQ ID NO: 209 - protein, 256 aa, Artificial Sequence
  Description of Artificial Sequence: Synthetic polypeptide
QVQLVQSGAEVKKPGASVKVSCKASGYTFTGYYIHWVRQAPGQGLEWMGWMNPNSGNTGYAQKFQGRVTMTRDTSTSTVYMELSSLRSEDTAVYYCARDPGFLGYCSGGSCYDGWFDPWGQGTLVTVSSGGGGSGGGGSGGGGSGGGGSDIQMTQSPSSLSASVGDRVTITCRASQSISSYLHWYQQKPGKAPKLLIYAASSLQSGVPSRFSGSGSGTDFTLTISSLQPEDFATYYCQQSYTAPYTFGQGTKLEIK

SEQ ID NO: 210 - protein, 9 aa, Artificial Sequence
  Description of Artificial Sequence: Synthetic peptide
YTFTDYFLH

SEQ ID NO: 211 - protein, 13 aa, Artificial Sequence
  Description of Artificial Sequence: Synthetic peptide
GWMNPTSGNTGYA

SEQ ID NO: 212 - protein, 13 aa, Artificial Sequence
  Description of Artificial Sequence: Synthetic peptide
CAREGEGSGFDYW

SEQ ID NO: 213 - protein, 11 aa, Artificial Sequence
  Description of Artificial Sequence: Synthetic peptide
RASQGINSWLA

SEQ ID NO: 214 - protein, 245 aa, Artificial Sequence
  Description of Artificial Sequence: Synthetic polypeptide
QVQLVQSGAEVKKPGASVKVSCKASGYTFTDYFLHWVRQAPGQGLEWMGWMNPTSGNTGYAQKFQGRVTMTRDTSTSTVYMELSSLRSEDTAVYYCAREGEGSGFDYWGQGTLVTVSSGGGGSGGGGSGGGGSGGGGSDIQMTQSPSSLSASVGDRVTITCRASQGINSWLAWYQQKPGKAPKLLIYDASNLETGVPSRFSGSGSGTDFTLTISSLQPEDFATYYCQQSYSTPLTFGGGTKVEIK

SEQ ID NO: 215 - protein, 9 aa, Artificial Sequence
  Description of Artificial Sequence: Synthetic peptide
YTFTSYYMH

SEQ ID NO: 216 - protein, 13 aa, Artificial Sequence
  Description of Artificial Sequence: Synthetic peptide
AWMNPNSGNTGYA

SEQ ID NO: 217 - protein, 15 aa, Artificial Sequence
  Description of Artificial Sequence: Synthetic peptide
CARDYDFWSGSLGYW

SEQ ID NO: 218 - protein, 11 aa, Artificial Sequence
  Description of Artificial Sequence: Synthetic peptide
RASQGISNYLA

SEQ ID NO: 219 - protein, 247 aa, Artificial Sequence
  Description of Artificial Sequence: Synthetic polypeptide
QVQLVQSGAEVKKPGASVKVSCKASGYTFTSYYMHWVRQAPGQGLEWMAWMNPNSGNTGYAQKFQGRVTMTRDTSTSTVYMELSSLRSEDTAVYYCARDYDFWSGSLGYWGQGTLVTVSSGGGGSGGGGSGGGGSGGGGSDIQMTQSPSSLSASVGDRVTITCRASQGISNYLAWYQQKPGKAPKLLIYAASSLQSGVPSRFSGSGSGTDFTLTISSLQPEDFATYYCQQSYSTPWTFGQGTKVEIK

SEQ ID NO: 220 - protein, 20 aa, Artificial Sequence
  Description of Artificial Sequence: Synthetic peptide
CARDTGYSYGRYYYYGMDVW

SEQ ID NO: 221 - protein, 11 aa, Artificial Sequence
  Description of Artificial Sequence: Synthetic peptide
RASQSIGRWLA

SEQ ID NO: 222 - protein, 7 aa, Artificial Sequence
  Description of Artificial Sequence: Synthetic peptide
DASNLQS

SEQ ID NO: 223 - protein, 252 aa, Artificial Sequence
  Description of Artificial Sequence: Synthetic polypeptide
QVQLVQSGAEVKKPGASVKVSCKASGYTFTSYYMHWVRQAPGQGLEWMGIINPSGGSTSYAQKFQGRVTMTRDTSTSTVYMELSSLRSEDTAVYYCARDTGYSYGRYYYYGMDVWGQGTLVTVSSGGGGSGGGGSGGGGSGGGGSDIQMTQSPSSLSASVGDRVTITCRASQSIGRWLAWYQQKPGKAPKLLIYDASNLQSGVPSRFSGSGSGTDFTLTISSLQPEDFATYYCQQSYSIPITFGQGTKVEIK

SEQ ID NO: 224 - protein, 9 aa, Artificial Sequence
  Description of Artificial Sequence: Synthetic peptide
YTLTDYYMH

SEQ ID NO: 225 - protein, 16 aa, Artificial Sequence
  Description of Artificial Sequence: Synthetic peptide
CAREEYSSSSGYFDYW

SEQ ID NO: 226 - protein, 11 aa, Artificial Sequence
  Description of Artificial Sequence: Synthetic peptide
RASQGISSWLA

SEQ ID NO: 227 - protein, 248 aa, Artificial Sequence
  Description of Artificial Sequence: Synthetic polypeptide
QVQLVQSGAEVKKPGASVKVSCKASGYTLTDYYMHWVRQAPGQGLEWMGIINPSGGSTSYAQKFQGRVTMTRDTSTSTVYMELSSLRSEDTAVYYCAREEYSSSSGYFDYWGQGTLVTVSSGGGGSGGGGSGGGGSGGGGSDIQMTQSPSSLSASVGDRVTITCRASQGISSWLAWYQQKPGKAPKLLIYAASSLQSGVPSRFSGSGSGTDFTLTISSLQPEDFATYYCQQSYSTPLTFGQGTKVEIK

SEQ ID NO: 228 - protein, 9 aa, Artificial Sequence
  Description of Artificial Sequence: Synthetic peptide
YTFTSYGIS

SEQ ID NO: 229 - protein, 13 aa, Artificial Sequence
  Description of Artificial Sequence: Synthetic peptide
GWMHPKSGDTGLT

SEQ ID NO: 230 - protein, 15 aa, Artificial Sequence [sequence omitted]

SEQ ID NO: 231 - protein, 11 aa, Artificial Sequence [sequence omitted]

SEQ ID NO: 232 - protein, 247 aa, Artificial Sequence
  Description of Artificial Sequence: Synthetic polypeptide
QVQLVQSGAEVKKPGASVKVSCKASGYTFTSYGISWVRQAPGQGLEWMGWMHPKSGDTGLTQKFQGRVTMTRDTSTSTVYMELSSLRSEDTAVYYCARDTPYYYYGMDVWGQGTTVTVSSGGGGSGGGGSGGGGSGGGGSDIQMTQSPSSLSASVGDRVTITCRASQSISSWLAWYQQKPGKAPKLLIYAASSLQSGVPSRFSGSGSGTDFTLTISSLQPEDFATYYCQQSYSVPITFGQGTKVEIK

SEQ ID NO: 233 - protein, 9 aa, Artificial Sequence
  Description of Artificial Sequence: Synthetic peptide
FTFGDYAMS

SEQ ID NO: 234 - protein, 13 aa, Artificial Sequence
  Description of Artificial Sequence: Synthetic peptide
SYISGDIGYTNYA

SEQ ID NO: 235 - protein, 16 aa, Artificial Sequence
  Description of Artificial Sequence: Synthetic peptide
CARDVAATGNWYFDLW

SEQ ID NO: 236 - protein, 248 aa, Artificial Sequence
  Description of Artificial Sequence: Synthetic polypeptide
EVQLVESGGGLVKPGGSLRLSCAASGFTFGDYAMSWVRQAPGKGLEWVSYISGDIGYTNYAAPVKGRFTISRDDSKNTLYLQMNSLKTEDTAVYYCARDVAATGNWYFDLWGRGTLVTVSSGGGGSGGGGSGGGGSGGGGSDIQMTQSPSSLSASVGDRVTITCRASQSISSYLNWYQQKPGKAPKLLIYAASSLQSGVPSRFSGSGSGTDFTLTISSLQPEDFATYYCQQSYSTPLTFGGGTKVEIK

SEQ ID NO: 237 - protein, 9 aa, Artificial Sequence
  Description of Artificial Sequence: Synthetic peptide
FSFSSYTMN

SEQ ID NO: 238 - protein, 13 aa, Artificial Sequence
  Description of Artificial Sequence: Synthetic peptide
SFITSSSRTIYYA

SEQ ID NO: 239 - protein, 18 aa, Artificial Sequence
  Description of Artificial Sequence: Synthetic peptide
CARDRRGDYGDSWYFDLW

SEQ ID NO: 240 - protein, 11 aa, Artificial Sequence
  Description of Artificial Sequence: Synthetic peptide
RASQSVRNYLA

SEQ ID NO: 241 - protein, 7 aa, Artificial Sequence
  Description of Artificial Sequence: Synthetic peptide
GASTRAT

SEQ ID NO: 242 - protein, 11 aa, Artificial Sequence [sequence omitted]

SEQ ID NO: 243 - protein, 250 aa, Artificial Sequence
  Description of Artificial Sequence: Synthetic polypeptide
EVQLLESGGGLVQPGGSLRLSCAASGFSFSSYTMNWVRQAPGKGLEWVSFITSSSRTIYYADSVKGRFTISRDNSKNTLYLQMNSLRAEDTAVYYCARDRRGDYGDSWYFDLWGRGTLVTVSSGGGGSGGGGSGGGGSGGGGSEIVMTQSPATLSVSPGERATLSCRASQSVRNYLAWYQQKPGQAPRLLIYGASTRATGIPARFSGSGSGTEFTLTISSLQSEDFAVYYCQQYGSSPLTFGGGTKVEIK

SEQ ID NO: 244 - protein, 9 aa, Artificial Sequence
  Description of Artificial Sequence: Synthetic peptide
YTFTGHYMH

SEQ ID NO: 245 - protein, 252 aa, Artificial Sequence
  Description of Artificial Sequence: Synthetic polypeptide
QVQLVQSGAEVKKPGASVKVSCKASGYTFTGHYMHWVRQAPGQGLEWMGIINPSGGSTSYAQKFQGRVTMTRDTSTSTVYMELSSLRSEDTAVYYCARDTGYSYGRYYYYGMDVWGQGTTVTVSSGGGGSGGGGSGGGGSGGGGSDIQMTQSPSSLSASVGDRVTITCRASQSIGRWLAWYQQKPGKAPKLLIYDASNLQSGVPSRFSGSGSGTDFTLTISSLQPEDFATYYCQQSYSIPITFGGGTKVEIK

SEQ ID NO: 246 - protein, 9 aa, Artificial Sequence
  Description of Artificial Sequence: Synthetic peptide
YTFSKHFVH

SEQ ID NO: 247 - protein, 13 aa, Artificial Sequence
  Description of Artificial Sequence: Synthetic peptide
GWMNPNSGNSGYA

SEQ ID NO: 248 - protein, 16 aa, Artificial Sequence
  Description of Artificial Sequence: Synthetic peptide
CARGEGGYYYYGMDVW

SEQ ID NO: 249 - protein, 248 aa, Artificial Sequence
  Description of Artificial Sequence: Synthetic polypeptide
QVQLVQSGAEVKKPGASVKVSCKASGYTFSKHFVHWVRQAPGQGLEWMGWMNPNSGNSGYAQKFQGRVTMTRDTSTSTVYMELSSLRSEDTAVYYCARGEGGYYYYGMDVWGQGTLVTVSSGGGGSGGGGSGGGGSGGGGSDIQMTQSPSSLSASVGDRVTITCRASQSISSWLAWYQQKPGKAPKLLIYAASTLQSGVPSRFSGSGSGTDFTLTISSLQPEDFATYYCQQSYSTPWTFGQGTKVEIK

SEQ ID NO: 250 - protein, 9 aa, Artificial Sequence
  Description of Artificial Sequence: Synthetic peptide
FTFGSYSMS

SEQ ID NO: 251 - protein, 12 aa, Artificial Sequence
  Description of Artificial Sequence: Synthetic peptide
SAIGTGGGTYYA

SEQ ID NO: 252 - protein, 16 aa, Artificial Sequence
  Description of Artificial Sequence: Synthetic peptide
CAKGTPYYYYYGMDVW

SEQ ID NO: 253 - protein, 11 aa, Artificial Sequence
  Description of Artificial Sequence: Synthetic peptide
RASQPLSNWLA

SEQ ID NO: 254 - protein, 11 aa, Artificial Sequence [sequence omitted]

SEQ ID NO: 255 - protein, 247 aa, Artificial Sequence
  Description of Artificial Sequence: Synthetic polypeptide
EVQLLESGGGLVQPGGSLRLSCAASGFTFGSYSMSWVRQAPGKGLEWVSAIGTGGGTYYADSVKGRFTISRDNSKNTLYLQMNSLRAEDTAVYYCAKGTPYYYYYGMDVWGQGTMVTVSSGGGGSGGGGSGGGGSGGGGSDIQMTQSPSSLSASVGDRVTITCRASQPLSNWLAWYQQKPGKAPKLLIYAASSLQSGVPSRFSGSGSGTDFTLTISSLQPEDFATYYCQQAISFPLTFGGGTKVEIK

SEQ ID NO: 256 - protein, 20 aa, Artificial Sequence
  Description of Artificial Sequence: Synthetic peptide
CARDLGYYDSSGYFGAFDIW

SEQ ID NO: 257 - protein, 11 aa, Artificial Sequence
  Description of Artificial Sequence: Synthetic peptide
QSSEDISSSLN

SEQ ID NO: 258 - protein, 7 aa, Artificial Sequence
  Description of Artificial Sequence: Synthetic peptide
AASSLQI

SEQ ID NO: 259 - protein, 11 aa, Artificial Sequence [sequence omitted]

SEQ ID NO: 260 - protein, 252 aa, Artificial Sequence
  Description of Artificial Sequence: Synthetic polypeptide
QVQLVQSGAEVKKPGASVKVSCKASGYTFTSYYMHWVRQAPGQGLEWMGWMNPNSGNTGYAQKFQGRVTMTRDTSTSTVYMELSSLRSEDTAVYYCARDLGYYDSSGYFGAFDIWGQGTTVTVSSGGGGSGGGGSGGGGSGGGGSDIQMTQSPSSLSASVGDRVTITCQSSEDISSSLNWYQQKPGKAPKLLIYAASSLQIGVPSRFSGSGSGTDFTLTISSLQPEDFATYYCQQTYSTPYTFGQGTKVEIK

SEQ ID NO: 261 - protein, 13 aa, Artificial Sequence
  Description of Artificial Sequence: Synthetic peptide
GIINPRGGSTIFA

SEQ ID NO: 262 - protein, 17 aa, Artificial Sequence
  Description of Artificial Sequence: Synthetic peptide
CARGTRSSGWYGWFDPW

SEQ ID NO: 263 - protein, 11 aa, Artificial Sequence
  Description of Artificial Sequence: Synthetic peptide
RASQGIGNWLA

SEQ ID NO: 264 - protein, 7 aa, Artificial Sequence
  Description of Artificial Sequence: Synthetic peptide
AASNLET

SEQ ID NO: 265 - protein, 11 aa, Artificial Sequence
  Description of Artificial Sequence: Synthetic peptide
CQQIHSYPLTF

SEQ ID NO: 266 - protein, 249 aa, Artificial Sequence
  Description of Artificial Sequence: Synthetic polypeptide
QVQLVQSGAEVKKPGASVKVSCKASGYTFTSYGISWVRQAPGQGLEWMGIINPRGGSTIFAQKFQGRVTMTRDTSTSTVYMELSSLRSEDTAVYYCARGTRSSGWYGWFDPWGQGTLVTVSSGGGGSGGGGSGGGGSGGGGSDIQMTQSPSSLSASVGDRVTITCRASQGIGNWLAWYQQKPGKAPKLLIYAASNLETGVPSRFSGSGSGTDFTLTISSLQPEDFATYYCQQIHSYPLTFGGGTKVEIK

SEQ ID NO: 267 - protein, 9 aa, Artificial Sequence
  Description of Artificial Sequence: Synthetic peptide
FTFDDYGMS

SEQ ID NO: 268 - protein, 13 aa, Artificial Sequence
  Description of Artificial Sequence: Synthetic peptide
SYISSSSSYIYYA

SEQ ID NO: 269 - protein, 16 aa, Artificial Sequence
  Description of Artificial Sequence: Synthetic peptide
CAREIAAAGFYGMDVW

SEQ ID NO: 270 - protein, 248 aa, Artificial Sequence
  Description of Artificial Sequence: Synthetic polypeptide
EVQLLESGGGLVQPGGSLRLSCAASGFTFDDYGMSWVRQAPGKGLEWVSYISSSSSYIYYADSVKGRFTISRDNSKNTLYLQMNSLRAEDTAVYYCAREIAAAGFYGMDVWGQGTTVTVSSGGGGSGGGGSGGGGSGGGGSDIQMTQSPSSLSASVGDRVTITCRASQSISSYLNWYQQKPGKAPKLLIYAASSLQSGVPSRFSGSGSGTDFTLTISSLQPEDFATYYCQQSYSTPLTFGGGTKVEIK

SEQ ID NO: 271 - protein, 9 aa, Artificial Sequence
  Description of Artificial Sequence: Synthetic peptide
GTLSRYGVS

SEQ ID NO: 272 - protein, 13 aa, Artificial Sequence
  Description of Artificial Sequence: Synthetic peptide
GGIIPIFGTTNYA

SEQ ID NO: 273 - protein, 21 aa, Artificial Sequence
  Description of Artificial Sequence: Synthetic peptide
CARDRVYYDSSGYPTWYFDLW

SEQ ID NO: 274 - protein, 12 aa, Artificial Sequence
  Description of Artificial Sequence: Synthetic peptide
RASQSVSSSYLA

SEQ ID NO: 275 - protein, 11 aa, Artificial Sequence [sequence omitted]

SEQ ID NO: 276 - protein, 254 aa, Artificial Sequence
  Description of Artificial Sequence: Synthetic polypeptide
QVQLVQSGAEVKKPGSSVKVSCKASGGTLSRYGVSWVRQAPGQGLEWMGGIIPIFGTTNYAQKFQGRVTITADESTSTAYMELSSLRSEDTAVYYCARDRVYYDSSGYPTWYFDLWGRGTLVTVSSGGGGSGGGGSGGGGSGGGGSEIVMTQSPATLSVSPGERATLSCRASQSVSSSYLAWYQQKPGQAPRLLIYGASTRATGIPARFSGSGSGTEFTLTISSLQSEDFAVYYCQQYGSSPITFGQGTKVEIK

SEQ ID NO: 277 - protein, 9 aa, Artificial Sequence
  Description of Artificial Sequence: Synthetic peptide
FTFDDFAMH

SEQ ID NO: 278 - protein, 13 aa, Artificial Sequence
  Description of Artificial Sequence: Synthetic peptide
SGISGNGDSRYYA

SEQ ID NO: 279 - protein, 16 aa, Artificial Sequence
  Description of Artificial Sequence: Synthetic peptide
CARDASYGGNYGMDVW

SEQ ID NO: 280 - protein, 11 aa, Artificial Sequence
  Description of Artificial Sequence: Synthetic peptide
QASQDIRNYLN

SEQ ID NO: 281 - protein, 248 aa, Artificial Sequence
  Description of Artificial Sequence: Synthetic polypeptide
EVQLLESGGGLVQPGGSLRLSCAASGFTFDDFAMHWVRQAPGKGLEWVSGISGNGDSRYYADSVKGRFTISRDNSKNTLYLQMNSLRAEDTAVYYCARDASYGGNYGMDVWGQGTTVTVSSGGGGSGGGGSGGGGSGGGGSDIQMTQSPSSLSASVGDRVTITCQASQDIRNYLNWYQQKPGKAPKLLIYKASTLESGVPSRFSGSGSGTDFTLTISSLQPEDFATYYCQQANSFPLTFGPGTKVDIK

SEQ ID NO: 282 - protein, 15 aa, Artificial Sequence
  Description of Artificial Sequence: Synthetic peptide
CAREWLVPYYGMDVW

SEQ ID NO: 283 - protein, 11 aa, Artificial Sequence
  Description of Artificial Sequence: Synthetic peptide
RASQSISRWLA

SEQ ID NO: 284 - protein, 7 aa, Artificial Sequence
  Description of Artificial Sequence: Synthetic peptide
GASNLQS

SEQ ID NO: 285 - protein, 246 aa, Artificial Sequence
  Description of Artificial Sequence: Synthetic polypeptide
EVQLVESGGGLVKPGGSLRLSCAASGFTFSSYWMSWVRQAPGKGLEWVSAIGTGGGTYYAAPVKGRFTISRDDSKNTLYLQMNSLKTEDTAVYYCAREWLVPYYGMDVWGQGTTVTVSSGGGGSGGGGSGGGGSGGGGSDIQMTQSPSSLSASVGDRVTITCRASQSISRWLAWYQQKPGKAPKLLIYGASNLQSGVPSRFSGSGSGTDFTLTISSLQPEDFATYYCQQSYSTPWTFGQGTKVEIK

SEQ ID NO: 286 - protein, 9 aa, Artificial Sequence
  Description of Artificial Sequence: Synthetic peptide
FSVSSNYMS

SEQ ID NO: 287 - protein, 13 aa, Artificial Sequence
  Description of Artificial Sequence: Synthetic peptide
AGISYDGSSKPYA

SEQ ID NO: 288 - protein, 15 aa, Artificial Sequence
  Description of Artificial Sequence: Synthetic peptide
CARSRGIAARPLQHW

SEQ ID NO: 289 - protein, 17 aa, Artificial Sequence
  Description of Artificial Sequence: Synthetic peptide
KSSQSVLYSSNNKNYLA

SEQ ID NO: 290 - protein, 7 aa, Artificial Sequence
  Description of Artificial Sequence: Synthetic peptide
WASTRQS

SEQ ID NO: 291 - protein, 11 aa, Artificial Sequence
  Description of Artificial Sequence: Synthetic peptide
CHQYYGHPPTF

SEQ ID NO: 292 - protein, 253 aa, Artificial Sequence
  Description of Artificial Sequence: Synthetic polypeptide
EVQLLESGGGLVQPGGSLRLSCAASGFSVSSNYMSWVRQAPGKGLEWVAGISYDGSSKPYADSVKGRFTISRDNSKNTLYLQMNSLRAEDTAVYYCARSRGIAARPLQHWGQGTLVTVSSGGGGSGGGGSGGGGSGGGGSDIVMTQSPDSLAVSLGERATINCKSSQSVLYSSNNKNYLAWYQQKPGQPPKLLIYWASTRQSGVPDRFSGSGSGTDFTLTISSLQAEDVAVYYCHQYYGHPPTFGGGTKVEIK

SEQ ID NO: 293 - protein, 7 aa, Artificial Sequence
  Description of Artificial Sequence: Synthetic peptide
QASTRQS

SEQ ID NO: 294 - protein, 253 aa, Artificial Sequence
  Description of Artificial Sequence: Synthetic polypeptide
EVQLLESGGGLVQPGGSLRLSCAASGFSVSSNYMSWVRQAPGKGLEWVAGISYDGSSKPYADSVKGRFTISRDNSKNTLYLQMNSLRAEDTAVYYCARSRGIAARPLQHWGQGTLVTVSSGGGGSGGGGSGGGGSGGGGSDIVMTQSPDSLAVSLGERATINCKSSQSVLYSSNNKNYLAWYQQKPGQPPKLLIYQASTRQSGVPDRFSGSGSGTDFTLTISSLQAEDVAVYYCHQYYGHPPTFGGGTKVEIK

SEQ ID NO: 295 - protein, 9 aa, Artificial Sequence
  Description of Artificial Sequence: Synthetic peptide
FSFSDYGMH

SEQ ID NO: 296 - protein, 16 aa, Artificial Sequence
  Description of Artificial Sequence: Synthetic peptide
CARDGGWQPAAILDYW

SEQ ID NO: 297 - protein, 248 aa, Artificial Sequence
  Description of Artificial Sequence: Synthetic polypeptide
EVQLLESGGGLVQPGGSLRLSCAASGFSFSDYGMHWVRQAPGKGLEWVSAISGSGGSTYYADSVKGRFTISRDNSKNTLYLQMNSLRAEDTAVYYCARDGGWQPAAILDYWGQGTLVTVSSGGGGSGGGGSGGGGSGGGGSDIQMTQSPSSLSASVGDRVTITCRASQGISNNLNWYQQKPGKAPKLLIYDASNLETGVPSRFSGSGSGTDFTLTISSLQPEDFATYYCQQSYSTPLTFGGGTKVEIK

SEQ ID NO: 298 - protein, 9 aa, Artificial Sequence
  Description of Artificial Sequence: Synthetic peptide
FTFSDHGMH

SEQ ID NO: 299 - protein, 12 aa, Artificial Sequence
  Description of Artificial Sequence: Synthetic peptide
SVIYGGESTYYA

SEQ ID NO: 300 - protein, 16 aa, Artificial Sequence
  Description of Artificial Sequence: Synthetic peptide
CARDPAVAGGGIFDYW

SEQ ID NO: 301 - protein, 11 aa, Artificial Sequence
  Description of Artificial Sequence: Synthetic peptide
CQQSYSTCYTF

SEQ ID NO: 302 - protein, 247 aa, Artificial Sequence
  Description of Artificial Sequence: Synthetic polypeptide
EVQLLESGGGLVQPGGSLRLSCAASGFTFSDHGMHWVRQAPGKGLEWVSVIYGGESTYYADSVKGRFTISRDNSKNTLYLQMNSLRAEDTAVYYCARDPAVAGGGIFDYWGQGTLVTVSSGGGGSGGGGSGGGGSGGGGSDIQMTQSPSSLSASVGDRVTITCRASQGISNYLAWYQQKPGKAPKLLIYDASNLETGVPSRFSGSGSGTDFTLTISSLQPEDFATYYCQQSYSTCYTFGQGTKLEIK

SEQ ID NO: 303 - protein, 9 aa, Artificial Sequence
  Description of Artificial Sequence: Synthetic peptide
DTFTGYYIH

SEQ ID NO: 304 - protein, 13 aa, Artificial Sequence
  Description of Artificial Sequence: Synthetic peptide
GWINPNSGGTNYA

SEQ ID NO: 305 - protein, 17 aa, Artificial Sequence
  Description of Artificial Sequence: Synthetic peptide
CARSGLWLGSYYGMDVW

SEQ ID NO: 306 - protein, 11 aa, Artificial Sequence
  Description of Artificial Sequence: Synthetic peptide
RASQTISIWLA

SEQ ID NO: 307 - protein, 7 aa, Artificial Sequence
  Description of Artificial Sequence: Synthetic peptide
DASTLQS

SEQ ID NO: 308 - protein, 11 aa, Artificial Sequence [sequence omitted]

SEQ ID NO: 309 - protein, 249 aa, Artificial Sequence
  Description of Artificial Sequence: Synthetic polypeptide
QVQLVQSGAEVKKPGASVKVSCKASGDTFTGYYIHWVRQAPGQGLEWMGWINPNSGGTNYAQKFQGRVTMTRDTSTSTVYMELSSLRSEDTAVYYCARSGLWLGSYYGMDVWGQGTLVTVSSGGGGSGGGGSGGGGSGGGGSDIQMTQSPSSLSASVGDRVTITCRASQTISIWLAWYQQKPGKAPKLLIYDASTLQSGVPSRFSGSGSGTDFTLTISSLQPEDFATYYCQQYSSYPLTFGQGTKVEIK

SEQ ID NO: 310 - protein, 9 aa, Artificial Sequence
  Description of Artificial Sequence: Synthetic peptide
YTFTSYDIN

SEQ ID NO: 311 - protein, 13 aa, Artificial Sequence
  Description of Artificial Sequence: Synthetic peptide
GWINPNSGTTGYA

SEQ ID NO: 312 - protein, 14 aa, Artificial Sequence
  Description of Artificial Sequence: Synthetic peptide
CARSPYYYYGMDVW

SEQ ID NO: 313 - protein, 11 aa, Artificial Sequence
  Description of Artificial Sequence: Synthetic peptide
RASHFISRWVA

SEQ ID NO: 314 - protein, 10 aa, Artificial Sequence
  Description of Artificial Sequence: Synthetic peptide
CQQSYSGISF

SEQ ID NO: 315 - protein, 245 aa, Artificial Sequence
  Description of Artificial Sequence: Synthetic polypeptide
QVQLVQSGAEVKKPGASVKVSCKASGYTFTSYDINWVRQAPGQGLEWMGWINPNSGTTGYAQKFQGRVTMTRDTSTSTVYMELSSLRSEDTAVYYCARSPYYYYGMDVWGQGTTVTVSSGGGGSGGGGSGGGGSGGGGSDIQMTQSPSSLSASVGDRVTITCRASHFISRWVAWYQQKPGKAPKLLIYAASTLQSGVPSRFSGSGSGTDFTLTISSLQPEDFATYYCQQSYSGISFGPGTKVDIK

SEQ ID NO: 316 - protein, 9 aa, Artificial Sequence
  Description of Artificial Sequence: Synthetic peptide
FTFNNYGMN

SEQ ID NO: 317 - protein, 13 aa, Artificial Sequence
  Description of Artificial Sequence: Synthetic peptide
SRINSDGSSTSYA

SEQ ID NO: 318 - protein, 14 aa, Artificial Sequence [sequence omitted]

SEQ ID NO: 319 - protein, 12 aa, Artificial Sequence
  Description of Artificial Sequence: Synthetic peptide
RASQSVSGSYLA

SEQ ID NO: 320 - protein, 7 aa, Artificial Sequence
  Description of Artificial Sequence: Synthetic peptide
ATSSRAS

SEQ ID NO: 321 - protein, 10 aa, Artificial Sequence
  Description of Artificial Sequence: Synthetic peptide
CQQYYSGLTF

SEQ ID NO: 322 - protein, 246 aa, Artificial Sequence
  Description of Artificial Sequence: Synthetic polypeptide
EVQLLESGGGLVQPGGSLRLSCAASGFTFNNYGMNWVRQAPGKGLEWVSRINSDGSSTSYADSVKGRFTISRDNSKNTLYLQMNSLRAEDTAVYYCARGAYYYYYMDVWGQGTLVTVSSGGGGSGGGGSGGGGSGGGGSEIVMTQSPATLSVSPGERATLSCRASQSVSGSYLAWYQQKPGQAPRLLIYATSSRASGIPARFSGSGSGTEFTLTISSLQSEDFAVYYCQQYYSGLTFGQGTKVEIK

SEQ ID NO: 323 - protein, 9 aa, Artificial Sequence
  Description of Artificial Sequence: Synthetic peptide
FTFSNSDMN

SEQ ID NO: 324 - protein, 13 aa, Artificial Sequence
  Description of Artificial Sequence: Synthetic peptide
AHIWNDGSQKYYA

SEQ ID NO: 325 - protein, 17 aa, Artificial Sequence
  Description of Artificial Sequence: Synthetic peptide
CARDRTDPGYSSAMDVW

SEQ ID NO: 326 - protein, 11 aa, Artificial Sequence
  Description of Artificial Sequence: Synthetic peptide
RASQDIRNYLG

SEQ ID NO: 327 - protein, 7 aa, Artificial Sequence
  Description of Artificial Sequence: Synthetic peptide
DASSLET

SEQ ID NO: 328 - protein, 11 aa, Artificial Sequence
  Description of Artificial Sequence: Synthetic peptide
CQQATSLPLTF

SEQ ID NO: 329 - protein, 249 aa, Artificial Sequence
  Description of Artificial Sequence: Synthetic polypeptide
EVQLLESGGGLVQPGGSLRLSCAASGFTFSNSDMNWVRQAPGKGLEWVAHIWNDGSQKYYADSVKGRFTISRDNSKNTLYLQMNSLRAEDTAVYYCARDRTDPGYSSAMDVWGQGTTVTVSSGGGGSGGGGSGGGGSGGGGSDIQMTQSPSSLSASVGDRVTITCRASQDIRNYLGWYQQKPGKAPKLLIYDASSLETGVPSRFSGSGSGTDFTLTISSLQPEDFATYYCQQATSLPLTFGGGTKVEIK

SEQ ID NO: 330 - protein, 15 aa, Artificial Sequence
  Description of Artificial Sequence: Synthetic peptide
CAKDSDYSNLLWDYW

SEQ ID NO: 331 - protein, 11 aa, Artificial Sequence
  Description of Artificial Sequence: Synthetic peptide
RASQDITNDLG

SEQ ID NO: 332 - protein, 7 aa, Artificial Sequence
  Description of Artificial Sequence: Synthetic peptide
QASSLES

SEQ ID NO: 333 - protein, 11 aa, Artificial Sequence [sequence omitted]

SEQ ID NO: 334 - protein, 247 aa, Artificial Sequence
  Description of Artificial Sequence: Synthetic polypeptide
QVQLVQSGAEVKKPGASVKVSCKASGYTFTSYDINWVRQAPGQGLEWMGWMNPNSGNTGYAQKFQGRVTMTRDTSTSTVYMELSSLRSEDTAVYYCAKDSDYSNLLWDYWGQGTLVTVSSGGGGSGGGGSGGGGSGGGGSDIQMTQSPSSLSASVGDRVTITCRASQDITNDLGWYQQKPGKAPKLLIYQASSLESGVPSRFSGSGSGTDFTLTISSLQPEDFATYYCQQSYTIPLTFGQGTKVEIK

SEQ ID NO: 335 - protein, 13 aa, Artificial Sequence
  Description of Artificial Sequence: Synthetic peptide
AVVSYDGTNKYYA

SEQ ID NO: 336 - protein, 16 aa, Artificial Sequence
  Description of Artificial Sequence: Synthetic peptide
CAKDICSSTSCYFDLW

SEQ ID NO: 337 - protein, 11 aa, Artificial Sequence
  Description of Artificial Sequence: Synthetic peptide
RASQNINNYVN

SEQ ID NO: 338 - protein, 11 aa, Artificial Sequence [sequence omitted]

SEQ ID NO: 339 - protein, 248 aa, Artificial Sequence
  Description of Artificial Sequence: Synthetic polypeptide
EVQLLESGGGLVQPGGSLRLSCAASGFTFGDYAMSWVRQAPGKGLEWVAVVSYDGTNKYYADSVKGRFTISRDNSKNTLYLQMNSLRAEDTAVYYCAKDICSSTSCYFDLWGRGTLVTVSSGGGGSGGGGSGGGGSGGGGSDIQMTQSPSSLSASVGDRVTITCRASQNINNYVNWYQQKPGKAPKLLIYDASNLETGVPSRFSGSGSGTDFTLTISSLQPEDFATYYCQQANSFPPTFGQGTRLEIK

SEQ ID NO: 340 - protein, 13 aa, Artificial Sequence
  Description of Artificial Sequence: Synthetic peptide
GIIDPSGGSTSYA

SEQ ID NO: 341 - protein, 17 aa, Artificial Sequence
  Description of Artificial Sequence: Synthetic peptide
CAREEWSSGGVGYFDYW

SEQ ID NO: 342 - protein, 11 aa, Artificial Sequence
  Description of Artificial Sequence: Synthetic peptide
RASQGISSYLA

SEQ ID NO: 343 - protein, 7 aa, Artificial Sequence
  Description of Artificial Sequence: Synthetic peptide
ATSSLQT

SEQ ID NO: 344 - protein, 11 aa, Artificial Sequence [sequence omitted]

SEQ ID NO: 345 - protein, 249 aa, Artificial Sequence
  Description of Artificial Sequence: Synthetic polypeptide
QVQLVQSGAEVKKPGASVKVSCKASGYTFTSYYMHWVRQAPGQGLEWMGIIDPSGGSTSYAQKFQGRVTMTRDTSTSTVYMELSSLRSEDTAVYYCAREEWSSGGVGYFDYWGQGTLVTVSSGGGGSGGGGSGGGGSGGGGSDIQMTQSPSSLSASVGDRVTITCRASQGISSYLAWYQQKPGKAPKLLIYATSSLQTGVPSRFSGSGSGTDFTLTISSLQPEDFATYYCQQTYSIPITFGQGTRLEIK

SEQ ID NO: 346 - protein, 13 aa, Artificial Sequence
  Description of Artificial Sequence: Synthetic peptide
SAISGGGEDTYYA

SEQ ID NO: 347 - protein, 7 aa, Artificial Sequence
  Description of Artificial Sequence: Synthetic peptide
KASSLES

SEQ ID NO: 348 - protein, 11 aa, Artificial Sequence
  Description of Artificial Sequence: Synthetic peptide
CQQANSYPVTF

SEQ ID NO: 349 - protein, 248 aa, Artificial Sequence
  Description of Artificial Sequence: Synthetic polypeptide
EVQLLESGGGLVQPGGSLRLSCAASGFTFDDYAMHWVRQAPGKGLEWVSAISGGGEDTYYADSVKGRFTISRDNSKNTLYLQMNSLRAEDTAVYYCARDASYGGNYGMDVWGQGTTVTVSSGGGGSGGGGSGGGGSGGGGSDIQMTQSPSSLSASVGDRVTITCQASQDIRNYLNWYQQKPGKAPKLLIYKASSLESGVPSRFSGSGSGTDFTLTISSLQPEDFATYYCQQANSYPVTFGGGTKVEIK

SEQ ID NO: 350 - protein, 19 aa, Artificial Sequence
  Description of Artificial Sequence: Synthetic peptide
CARDSVAGTGGRYYGMDVW

SEQ ID NO: 351 - protein, 11 aa, Artificial Sequence
  Description of Artificial Sequence: Synthetic peptide
RASQGISNYFA

SEQ ID NO: 352 - protein, 7 aa, Artificial Sequence
  Description of Artificial Sequence: Synthetic peptide
AASSLQG

SEQ ID NO: 353 - protein, 11 aa, Artificial Sequence [sequence omitted]

SEQ ID NO: 354 - protein, 251 aa, Artificial Sequence
  Description of Artificial Sequence: Synthetic polypeptide
QVQLVQSGAEVKKPGASVKVSCKASGYTFTSYYMHWVRQAPGQGLEWMGIINPSGGSTSYAQKFQGRVTMTRDTSTSTVYMELSSLRSEDTAVYYCARDSVAGTGGRYYGMDVWGQGTLVTVSSGGGGSGGGGSGGGGSGGGGSDIQMTQSPSSLSASVGDRVTITCRASQGISNYFAWYQQKPGKAPKLLIYAASSLQGGVPSRFSGSGSGTDFTLTISSLQPEDFATYYCQQSYSLPYTFGQGTKLEIK

SEQ ID NO: 355 - protein, 13 aa, Artificial Sequence
  Description of Artificial Sequence: Synthetic peptide
GIINPSGGNTKYA

SEQ ID NO: 356 - protein, 13 aa, Artificial Sequence
  Description of Artificial Sequence: Synthetic peptide
CTTADYYYYMDVW

SEQ ID NO: 357 - protein, 10 aa, Artificial Sequence
  Description of Artificial Sequence: Synthetic peptide
CQQYYSNADF

SEQ ID NO: 358 - protein, 244 aa, Artificial Sequence
  Description of Artificial Sequence: Synthetic polypeptide
QVQLVQSGAEVKKPGASVKVSCKASGYTFTGYYMHWVRQAPGQGLEWMGIINPSGGNTKYAQKFQGRVTMTRDTSTSTVYMELSSLRSEDTAVYYCTTADYYYYMDVWGKGTTVTVSSGGGGSGGGGSGGGGSGGGGSDIQMTQSPSSLSASVGDRVTITCRASQGISNYLAWYQQKPGKAPKLLIYAASSLQSGVPSRFSGSGSGTDFTLTISSLQPEDFATYYCQQYYSNADFGQGTKVEIK

SEQ ID NO: 359 - protein, 9 aa, Artificial Sequence
  Description of Artificial Sequence: Synthetic peptide
FTFSDFWMH

SEQ ID NO: 360 - protein, 14 aa, Artificial Sequence [sequence omitted]

SEQ ID NO: 361 - protein, 11 aa, Artificial Sequence
  Description of Artificial Sequence: Synthetic peptide
RASQSVSRSLA

SEQ ID NO: 362 - protein, 5 aa, Artificial Sequence
  Description of Artificial Sequence: Synthetic peptide
SSLQS

SEQ ID NO: 363 - protein, 9 aa, Artificial Sequence
  Description of Artificial Sequence: Synthetic peptide
QQYKSYPVT

SEQ ID NO: 364 - protein, 246 aa, Artificial Sequence
  Description of Artificial Sequence: Synthetic polypeptide
EVQLLESGGGLVQPGGSLRLSCAASGFTFSDFWMHWVRQAPGKGLEWISYISGDSGYTNYADSVKGRFTISRDNSKNTLYLQMNSLRAEDTAVYYCARDRPYYYYMDVWGKGTTVTVSSGGGGSGGGGSGGGGSGGGGSDIQMTQSPSSLSASVGDRVTITCRASQSVSRSLAWYQQKPGKAPKLLIYAASSLQSGVPSRFSGSGSGTDFTLTISSLQPEDFATYYCQQYKSYPVTFGQGTKVEIK

SEQ ID NO: 365 - protein, 9 aa, Artificial Sequence
  Description of Artificial Sequence: Synthetic peptide
FTFDDYTMH

SEQ ID NO: 366 - protein, 13 aa, Artificial Sequence
  Description of Artificial Sequence: Synthetic peptide
SDISGSGGSTYYA

SEQ ID NO: 367 - protein, 17 aa, Artificial Sequence
  Description of Artificial Sequence: Synthetic peptide
CAKDVVVAGTPLHFDYW

SEQ ID NO: 368 - protein, 5 aa, Artificial Sequence
  Description of Artificial Sequence: Synthetic peptide
SYLQS

SEQ ID NO: 369 - protein, 9 aa, Artificial Sequence
  Description of Artificial Sequence: Synthetic peptide
QQAHNYPIT

SEQ ID NO: 370 - protein, 249 aa, Artificial Sequence
  Description of Artificial Sequence: Synthetic polypeptide
EVQLLESGGGLVQPGGSLRLSCAASGFTFDDYTMHWVRQAPGKGLEWVSDISGSGGSTYYADSVKGRFTISRDNSKNTLYLQMNSLRAEDTAVYYCAKDVVVAGTPLHFDYWGQGTLVTVSSGGGGSGGGGSGGGGSGGGGSDIQMTQSPSSLSASVGDRVTITCQASQDISNYLNWYQQKPGKAPKLLIYAASYLQSGVPSRFSGSGSGTDFTLTISSLQPEDFATYYCQQAHNYPITFGQGTRLEIK

SEQ ID NO: 371 - protein, 13 aa, Artificial Sequence
  Description of Artificial Sequence: Synthetic peptide
ASISSTSAYIDYA

SEQ ID NO: 372 - protein, 14 aa, Artificial Sequence
  Description of Artificial Sequence: Synthetic peptide
CAREVVGATTFDYW

SEQ ID NO: 373 - protein, 11 aa, Artificial Sequence
  Description of Artificial Sequence: Synthetic peptide
RASQSISTWLA

SEQ ID NO: 374 - protein, 9 aa, Artificial Sequence
  Description of Artificial Sequence: Synthetic peptide
QQANAFPPT

SEQ ID NO: 375 - protein, 246 aa, Artificial Sequence
  Description of Artificial Sequence: Synthetic polypeptide
EVQLLESGGGLVQPGGSLRLSCAASEFTFSNAWMSWVRQAPGKGLEWVASISSTSAYIDYADSVKGRFTISRDNSKNTLYLQMNSLRAEDTAVYYCAREVVGATTFDYWGQGTLVTVSSGGGGSGGGGSGGGGSGGGGSDIQMTQSPSSLSASVGDRVTITCRASQSISTWLAWYQQKPGKAPKLLIYAASSLQSGVPSRFSGSGSGTDFTLTISSLQPEDFATYYCQQANAFPPTFGQGTRLEIK

SEQ ID NO: 376 - protein, 13 aa, Artificial Sequence
  Description of Artificial Sequence: Synthetic peptide
GWMEPHTGNTRYA

SEQ ID NO: 377 - protein, 12 aa, Artificial Sequence
  Description of Artificial Sequence: Synthetic peptide
CAKGGFSWFDPW

SEQ ID NO: 378 - protein, 5 aa, Artificial Sequence
  Description of Artificial Sequence: Synthetic peptide
STRES

SEQ ID NO: 379 - protein, 9 aa, Artificial Sequence
  Description of Artificial Sequence: Synthetic peptide
QQYYSTPPT

SEQ ID NO: 380 - protein, 250 aa, Artificial Sequence
  Description of Artificial Sequence: Synthetic polypeptide
QVQLVQSGAEVKKPGSSVKVSCKASGGTFSSYAISWVRQAPGQGLEWMGWMEPHTGNTRYAQKFQGRVTITADESTSTAYMELSSLRSEDTAVYYCAKGGFSWFDPWGQGTLVTVSSGGGGSGGGGSGGGGSGGGGSDIVMTQSPDSLAVSLGERATINCKSSQSVLYSSNNKNYLAWYQQKPGQPPKLLIYWASTRESGVPDRFSGSGSGTDFTLTISSLQAEDVAVYYCQQYYSTPPTFGQGTRLEIK

SEQ ID NO: 381 - protein, 13 aa, Artificial Sequence
  Description of Artificial Sequence: Synthetic peptide
ASITSSSAFIDYA

SEQ ID NO: 382 - protein, 15 aa, Artificial Sequence
  Description of Artificial Sequence: Synthetic peptide
CARERVDWNSYFDLW

SEQ ID NO: 383 - protein, 12 aa, Artificial Sequence
  Description of Artificial Sequence: Synthetic peptide
RASQGISNSYLA

SEQ ID NO: 384 - protein, 5 aa, Artificial Sequence
  Description of Artificial Sequence: Synthetic peptide
STRAT

SEQ ID NO: 385 - protein, 9 aa, Artificial Sequence
  Description of Artificial Sequence: Synthetic peptide
QQYYTYPPT

SEQ ID NO: 386 - protein, 248 aa, Artificial Sequence
  Description of Artificial Sequence: Synthetic polypeptide
EVQLLESGGGLVKPGGSLRLSCAASGFTFDDYAMHWVRQAPGKGLEWVASITSSSAFIDYAASVKGRFTISRDDSKNTLYLQMNSLKTEDTAVYYCARERVDWNSYFDLWGRGTLVTVSSGGGGSGGGGSGGGGSGGGGSEIVMTQSPATLSVSPGERATLSCRASQGISNSYLAWYQQKPGQAPRLLIYGASTRATGIPARFSGSGSGTEFTLTISSLQSEDFAVYYCQQYYTYPPTFGPGTKVDIK

SEQ ID NO: 387 - protein, 9 aa, Artificial Sequence
  Description of Artificial Sequence: Synthetic peptide
FAFSSHWMH

SEQ ID NO: 388 - protein, 13 aa, Artificial Sequence
  Description of Artificial Sequence: Synthetic peptide
AGTSGSGESRDYA

SEQ ID NO: 389 - protein, 14 aa, Artificial Sequence
  Description of Artificial Sequence: Synthetic peptide
CARETYYYYYMDVW

SEQ ID NO: 390 - protein, 5 aa, Artificial Sequence
  Description of Artificial Sequence: Synthetic peptide
ANLEG

SEQ ID NO: 391 - protein, 9 aa, Artificial Sequence
  Description of Artificial Sequence: Synthetic peptide
QQSDIFPPT

SEQ ID NO: 392 - protein, 246 aa, Artificial Sequence
  Description of Artificial Sequence: Synthetic polypeptide
EVQLLESGGGLVKPGGSLRLSCAASGFAFSSHWMHWVRQAPGKGLEWVAGTSGSGESRDYADFVKGRFTISRDDSKNTLYLQMNSLKTEDTAVYYCARETYYYYYMDVWGKGTTVTVSSGGGGSGGGGSGGGGSGGGGSDIQMTQSPSSLSASVGDRVTITCRASQGISNYLAWYQQKPGKAPKLLIYDAANLEGGVPSRFSGSGSGTDFTLTISSLQPEDFATYYCQQSDIFPPTFGQGTKVEIK

SEQ ID NO: 393 - protein, 9 aa, Artificial Sequence
  Description of Artificial Sequence: Synthetic peptide
YTFTRHWIH

SEQ ID NO: 394 - protein, 13 aa, Artificial Sequence
  Description of Artificial Sequence: Synthetic peptide
GWINVKTGGAGYA

SEQ ID NO: 395 - protein, 14 aa, Artificial Sequence
  Description of Artificial Sequence: Synthetic peptide
CARESSGWYGTDVW

SEQ ID NO: 396 - protein, 11 aa, Artificial Sequence
  Description of Artificial Sequence: Synthetic peptide
RASQSISNYLA

SEQ ID NO: 397 - protein, 9 aa, Artificial Sequence
  Description of Artificial Sequence: Synthetic peptide
QQSNSFPLT

SEQ ID NO: 398 - protein, 246 aa, Artificial Sequence
  Description of Artificial Sequence: Synthetic polypeptide
QVQLVQSGAEVKKPGASVKVSCKASGYTFTRHWIHWVRQAPGQGLEWMGWINVKTGGAGYAQKFQGRVTMTRDTSTSTVYMELSSLRSEDTAVYYCARESSGWYGTDVWGQGTTVTVSSGGGGSGGGGSGGGGSGGGGSDIQMTQSPSSLSASVGDRATITCRASQSISNYLAWYQQKPGKAPKLLIYAASSLQSGVPSRFSGSGSGTDFTLTISSLQPEDFATYYCQQSNSFPLTFGGGTKVEIK

SEQ ID NO: 399 - protein, 13 aa, Artificial Sequence
  Description of Artificial Sequence: Synthetic peptide
AAISYDGKYKDYE

SEQ ID NO: 400 - protein, 15 aa, Artificial Sequence
  Description of Artificial Sequence: Synthetic peptide
CARENKQWLASFDYW

SEQ ID NO: 401 - protein, 11 aa, Artificial Sequence
  Description of Artificial Sequence: Synthetic peptide
QASQDISNFVN

SEQ ID NO: 402 - protein, 4 aa, Artificial Sequence
  Description of Artificial Sequence: Synthetic peptide
NLRS

SEQ ID NO: 403 - protein, 9 aa, Artificial Sequence
  Description of Artificial Sequence: Synthetic peptide
QQANSFPVT

SEQ ID NO: 404 - protein, 246 aa, Artificial Sequence
  Description of Artificial Sequence: Synthetic polypeptide
EVQLLESGGGLVQPGGSLRLSCAASGFTFSSYWMHWVRQAPGKGLEWVAAISYDGKYKDYEDSVKGRFTISRDNSKNTLYLQMNSLRAEDTAVYYCARENKQWLASFDYWGQGTLVTVSSGGGGSGGGGSGGGGSGGGGSDIQMTQSPSSLSASVGDRVTITCQASQDISNFVNWYQQKPGKAPKLLIYAANLRSGVPSRFSGSGSGTDFTLTISSLQPEDFATYYCQQANSFPVTFGPGTKVDIK

SEQ ID NO: 405 - protein, 120 aa, Artificial Sequence
  Description of Artificial Sequence: Synthetic polypeptide
EVQLLESGGGLVQPGGSLRLSCAASGFTFSSYGMHWVRQAPGKGLEWVAVISDDGSDKYYADSVKGRFTISRDNSKNTLYLQMNSLRAEDTAVYYCTTSKYYYYYGMDVWGQGTTVTVSS

SEQ ID NO: 406 - protein, 107 aa, Artificial Sequence
  Description of Artificial Sequence: Synthetic polypeptide
DIQMTQSPSSLSASVGDRVTITCQASQDISKSLNWYQQKPGKAPKLLIYAASSLQSGVPSRFSGSGSGTDFTLTISSLQPEDFATYYCQQGYSTPLTFGGGTKVEIK

SEQ ID NO: 407 - protein, 119 aa, Artificial Sequence
  Description of Artificial Sequence: Synthetic polypeptide
QVQLVQSGAEVKKPGASVKVSCKASGYPFIGYYLHWVRQAPGQGLEWMGIINPSGGSTSYAQKFQGRVTMTRDTSTSTVYMELSSLRSEDTAVYYCAREGRLSYGMDAWGQGTLVTVSS

SEQ ID NO: 408 - protein, 107 aa, Artificial Sequence
  Description of Artificial Sequence: Synthetic polypeptide
DIQMTQSPSSLSASVGDRVTITCRASQSISSYLAWYQQKPGKAPKLLIYGASTLESGVPSRFSGSGSGTDFTLTISSLQPEDFATYYCQQTWGPPFTFGQGTKLEIK

SEQ ID NO: 409 - protein, 119 aa, Artificial Sequence
  Description of Artificial Sequence: Synthetic polypeptide
QVQLVQSGAEVKKPGASVKVSCKASGYPFIGQYLHWVRQAPGQGLEWMGIINPSGGSTSYAQKFQGRVTMTRDTSTSTVYMELSSLRSEDTAVYYCAREGRLSYGMDAWGQGTLVTVSS

SEQ ID NO: 410 - protein, 121 aa, Artificial Sequence
  Description of Artificial Sequence: Synthetic polypeptide
QVQLVQSGAEVKKPGASVKVSCKASGGTFSSYAISWVRQAPGQGLEWMGSINPSGDTTSYAQKFQGRVTMTRDTSTSTVYMELSSLRSEDTAVYYCAKDKAQWLVGYFDYWGQGTLVTVSS

SEQ ID NO: 411 - protein, 107 aa, Artificial Sequence
  Description of Artificial Sequence: Synthetic polypeptide
DIQMTQSPSSLSASVGDRVTITCQASQDISNSLNWYQQKPGKAPKLLIYAASSLQSGVPSRFSGSGSGTDFTLTISSLQPEDFATYYCQQSYSSVITFGQGTKVEIK

SEQ ID NO: 412 - protein, 118 aa, Artificial Sequence
  Description of Artificial Sequence: Synthetic polypeptide
EVQLLESGGGLVQPGGSLRLSCAASGFTFSSYWMHWVRQAPGKGLEWVSSISPGGSNIDYADSVKGRFTISRDNSKNTLYLQMNSLRAEDTAVYYCAREVQLSHYDYWGQGTLVTVSS

SEQ ID NO: 413 - protein, 107 aa, Artificial Sequence
  Description of Artificial Sequence: Synthetic polypeptide
DIQMTQSPSSLSASVGDRVTITCRASQGISNSLAWYQQKPGKAPKLLIYGASSLQSGVPSRFSGSGSGTDFTLTISSLQPEDFATYYCQQANSFPFTFGQGTKVEIK

SEQ ID NO: 414 - protein, 121 aa, Artificial Sequence
  Description of Artificial Sequence: Synthetic polypeptide
EVQLLESGGGLVQPGGSLRLSCAASGFTFNNYAFHWVRQAPGKGLEWVSRINSYGTSTTYADSVKGRFTISRDNSKNTLYLQMNSLRAEDTAVYYCAREGPVAGYWYFDLWGQGTLVTVSS

SEQ ID NO: 415 - protein, 107 aa, Artificial Sequence
  Description of Artificial Sequence: Synthetic polypeptide
DIQMTQSPSSLSASVGDRVTITCRASQIIGTNLAWYQQKPGKAPKLLIYGASSLQSGVPSRFSGSGSGTDFTLTISSLQPEDFATYYCQQSYRLPFTFGQGTKVEIK

SEQ ID NO: 416 - protein, 9 aa, Artificial Sequence
  Description of Artificial Sequence: Synthetic peptide
FTFSDYQMS

SEQ ID NO: 417 - protein, 14 aa, Artificial Sequence
  Description of Artificial Sequence: Synthetic peptide
AIISHADGGFKDYA

SEQ ID NO: 418 - protein, 18 aa, Artificial Sequence
  Description of Artificial Sequence: Synthetic peptide
CAKPYSSGWSAVYYFDYW

SEQ ID NO: 419 - protein, 11 aa, Artificial Sequence
  Description of Artificial Sequence: Synthetic peptide
RASRGITNDLG

SEQ ID NO: 420 - protein, 5 aa, Artificial Sequence
  Description of Artificial Sequence: Synthetic peptide
STLQS

SEQ ID NO: 421 - protein, 9 aa, Artificial Sequence
  Description of Artificial Sequence: Synthetic peptide
QQAYSFPWT

SEQ ID NO: 422 - protein, 124 aa, Artificial Sequence
  Description of Artificial Sequence: Synthetic polypeptide
EVQLLESGGGLVQPGGSLRLSCAASGFTFSDYQMSWVRQAPGKGLEWVAIISHADGGFKDYADSVKGRFTISRDNSKNTLYLQMNSLRAEDTAVYYCAKPYSSGWSAVYYFDYWGQGTLVTVSS

SEQ ID NO: 423 - protein, 107 aa, Artificial Sequence
  Description of Artificial Sequence: Synthetic polypeptide
DIQMTQSPSSLSASVGDRVTITCRASRGITNDLGWYQQKPGKAPKLLIYAASTLQSGVPSRFSGSGSGTDFTLTISSLQPEDFATYYCQQAYSFPWTFGQGTKVEIK

SEQ ID NO: 424 - protein, 121 aa, Artificial Sequence
  Description of Artificial Sequence: Synthetic polypeptide
QVQLVQSGAEVKKPGASVKVSCKASGYTFTGYHIHWVRQAPGQGLEWMGIINPSGGSTIYAQKFQGRVTMTRDTSTSTVYMELSSLRSEDTAVYYCAKDWSSWYLGPFDYWGQGTLVTVSS

SEQ ID NO: 425 - protein, 107 aa, Artificial Sequence
  Description of Artificial Sequence: Synthetic polypeptide
DIQMTQSPSSLSASVGDRVTITCRASQNISSSLNWYQQKPGKAPKLLIYAASSLQSGVPSRFSGSGSGTDFTLTISSLQPEDFATYYCQQSYTTPYTFGQGTKVEIK

SEQ ID NO: 426 - protein, 13 aa, Artificial Sequence
  Description of Artificial Sequence: Synthetic peptide
GIINHSGGSTSYA

SEQ ID NO: 427 - protein, 15 aa, Artificial Sequence
  Description of Artificial Sequence: Synthetic peptide
CARPYSGWYFAFDIW

SEQ ID NO: 428 - protein, 11 aa, Artificial Sequence
  Description of Artificial Sequence: Synthetic peptide
RASQSISSSLN

SEQ ID NO: 429 - protein, 9 aa, Artificial Sequence
  Description of Artificial Sequence: Synthetic peptide
QQSYSTPLT

SEQ ID NO: 430 - protein, 120 aa, Artificial Sequence
  Description of Artificial Sequence: Synthetic polypeptide
QVQLVQSGAEVKKPGASVKVSCKASGYTFTSYYMHWVRQAPGQGLEWMGIINHSGGSTSYAQKFQGRVTMTRDTSTSTVYMELSSLRSEDTAVYYCARPYSGWYFAFDIWGQGTLVTVSS

SEQ ID NO: 431 - protein, 107 aa, Artificial Sequence
  Description of Artificial Sequence: Synthetic polypeptide
DIQMTQSPSSLSASVGDRVTITCRASQSISSSLNWYQQKPGKAPKLLIYAASTLQSGVPSRFSGSGSGTDFTLTISSLQPEDFATYYCQQSYSTPLTFGQGTKVEIK

SEQ ID NO: 432 - protein, 121 aa, Artificial Sequence
  Description of Artificial Sequence: Synthetic polypeptide
EVQLLESGGGLVQPGGSLRLSCAASGFMFGDYAMHWVRQAPGKGLEWVSAISGSGGSTYYADSVKGRFTISRDNSKNTLYLQMNSLRAEDTAVYYCAKDLVVAGIWYFDLWGRGTLVTVSS

SEQ ID NO: 433 - protein, 107 aa, Artificial Sequence
  Description of Artificial Sequence: Synthetic polypeptide
DIQMTQSPSSLSASVGDRVTITCRASQGISNNLNWYQQKPGKAPKLLIYDASSLESGVPSRFSGSGSGTDFTLTISSLQPEDFATYYCQQTHSFPSTFGQGTKLEIK

SEQ ID NO: 434 - protein, 123 aa, Artificial Sequence
  Description of Artificial Sequence: Synthetic polypeptide
EVQLLESGGGLVQPGGSLRLSCAASGFTFSDYYMNWVRQAPGKGLEWVSVIGESGGSTYYADSVKGRFTISRDNSKNTLYLQMNSLRAEDTAVYYCAADPVSRWPKHGGGDYWGQGTLVTVSS

SEQ ID NO: 435 - protein, 107 aa, Artificial Sequence
  Description of Artificial Sequence: Synthetic polypeptide
DIQMTQSPSSLSASVGDRVTITCRASQGISSSLAWYQQKPGKAPKLLIYAASTLQSGVPSRFSGSGSGTDFTLTISSLQPEDFATYYCQQSYSTPWTFGQGTKVEIK

SEQ ID NO: 436 - protein, 118 aa, Artificial Sequence
  Description of Artificial Sequence: Synthetic polypeptide
QVQLVQSGAEVKKPGASVKVSCKASGYTLTTWYMYWVRQAPGQGLEWMGWINPNRGATNYAQKFQGRVTMTRDTSTSTVYMELSSLRSEDTAVYYCAKGDLWGAMDVWGQGTLVTVSS

SEQ ID NO: 437 - protein, 107 aa, Artificial Sequence
  Description of Artificial Sequence: Synthetic polypeptide
DIQMTQSPSSLSASVGDRVTITCRASDNIGSWLAWYQQKPGKAPKLLIYAASSLQSGVPSRFSGSGSGTDFTLTISSLQPEDFATYYCQQGYSTPPTFGQGTKVEIK

SEQ ID NO: 438 - protein, 127 aa, Artificial Sequence
  Description of Artificial Sequence: Synthetic polypeptide
QVQLVQSGAEVKKPGASVKVSCKASGYTFTTYYMHWVRQAPGQGLEWMGGFDPEDGETIYAQKFQGRVTMTRDTSTSTVYMELSSLRSEDTAVYYCARHAVAGAVGAGYYYYGMDVWGQGTMVTVSS

SEQ ID NO: 439 - protein, 107 aa, Artificial Sequence
  Description of Artificial Sequence: Synthetic polypeptide
DIQMTQSPSSLSASVGDRVTITCRASESISNWLAWYQQKPGKAPKLLIYAASTLQSGVPSRFSGSGSGTDFTLTISSLQPEDFATYYCQQSYSVPFTFGPGTKVDIK

SEQ ID NO: 440 - protein, 13 aa, Artificial Sequence
  Description of Artificial Sequence: Synthetic peptide
GGIIPIVDGVKYA

SEQ ID NO: 441 - protein, 17 aa, Artificial Sequence
  Description of Artificial Sequence: Synthetic peptide
CAKGQFTGNYYYGMDYW

SEQ ID NO: 442 - protein, 5 aa, Artificial Sequence
  Description of Artificial Sequence: Synthetic peptide
SKLEA

SEQ ID NO: 443 - protein, 9 aa, Artificial Sequence
  Description of Artificial Sequence: Synthetic peptide
QQSSEIPYS

SEQ ID NO: 444 - protein, 122 aa, Artificial Sequence
  Description of Artificial Sequence: Synthetic polypeptide
QVQLVQSGAEVKKPGSSVKVSCKASGYTFTNYYMHWVRQAPGQGLEWMGGIIPIVDGVKYAQKFQGRVTITADESTSTAYMELSSLRSEDTAVYYCAKGQFTGNYYYGMDYWGQGTLVTVSS

SEQ ID NO: 445 - protein, 107 aa, Artificial Sequence
  Description of Artificial Sequence: Synthetic polypeptide
DIQMTQSPSSLSASVGDRVTITCQANQDISNYLNWYQQKPGKAPKLLIYRASKLEAGVPSRFSGSGSGTDFTLTISSLQPEDFATYYCQQSSEIPYSFGQGTKVEIK

SEQ ID NO: 446 - protein, 119 aa, Artificial Sequence
  Description of Artificial Sequence: Synthetic polypeptide
QVQLVQSGAEVKKPGASVKVSCKASGYTFTGYYMHWVRQAPGQGLEWMGWIGPNSGDTNYAQKFQGRVTMTRDTSTSTVYMELSSLRSEDTAVYYCARDLDHNWYFDLWGRGTLVTVSS

SEQ ID NO: 447 - protein, 112 aa, Artificial Sequence
  Description of Artificial Sequence: Synthetic polypeptide
DIVMTQSPLSLPVTPGEPASISCRSSQSLLHSNGYNYLDWYLQKPGQSPQLLIYSSSNRAPGVPDRFSGSGSGTDFTLKISRVEAEDVGVYYCMQALHIPLTFGGGTKVEIK

SEQ ID NO: 448 - protein, 121 aa, Artificial Sequence
  Description of Artificial Sequence: Synthetic polypeptide
EVQLLESGGGLVQPGGSLRLSCAASGFTFDDYAMHWVRQAPGKGLEWVSYIDASGTTIYYADSVKGRFTISRDNSKNTLYLQMNSLRAEDTAVYYCAKDQAAAGYWYFDLWGRGTLVTVSS

SEQ ID NO: 449 - protein, 107 aa, Artificial Sequence
  Description of Artificial Sequence: Synthetic polypeptide
DIQMTQSPSSLSASVGDRVTITCQASQDISNYLNWYQQKPGKAPKLLIYKASTLESGVPSRFSGSGSGTDFTLTISSLQPEDFATYYCQQSYSTPITFGQGTRLEIK

SEQ ID NO: 450 - protein, 120 aa, Artificial Sequence
  Description of Artificial Sequence: Synthetic polypeptide
QVQLVQSGAEVKKPGSSVKVSCKASGYTFTDYHIHWVRQAPGQGLEWMGGIVPRSGSTTYAQKFQGRVTITADESTSTAYMELSSLRSEDTAVYYCAKDESSGWYYFDYWGQGTLVTVSS

SEQ ID NO: 451 - protein, 112 aa, Artificial Sequence
  Description of Artificial Sequence: Synthetic polypeptide
DIVMTQSPLSLPVTPGEPASISCRSSQSLLHSNGYNYLDWYLQKPGQSPQLLIYSAYNRASGVPDRFSGSGSGTDFTLKISRVEAEDVGVYYCMQALQTPLTFGQGTKVEIK

SEQ ID NO: 452 - protein, 122 aa, Artificial Sequence
  Description of Artificial Sequence: Synthetic polypeptide
QVQLVQSGAEVKKPGSSVKVSCKASGYTFTNYYMHWVRQAPGQGLEWMGGIIPIVDRVKYAQKFQGRVTITADESTSTAYMELSSLRSEDTAVYYCAKGRYTVNYYYGMDVWGQGTTVTVSS

SEQ ID NO: 453 - protein, 107 aa, Artificial Sequence
  Description of Artificial Sequence: Synthetic polypeptide
DIQMTQSPSSLSASVGDRVTITCQANQDISNYLNWYQQKPGKAPKLLIYRASKLEAGVPSRFSGSGSGTDFTLTISSLQPEDFATYYCQQSSEIPYSFGQGTKLEIK

SEQ ID NO: 454 - protein, 121 aa, Artificial Sequence
  Description of Artificial Sequence: Synthetic polypeptide
EVQLLESGGGLVQPGGSLRLSCAASGFTFEDYAMHWVRQAPGKGLEWVSYLNSDGGSTSYADSVKGRFTISRDNSKNTLYLQMNSLRAEDTAVYYCAKDYCTNGVCAFDYWGQGTLVTVSS

SEQ ID NO: 455 - protein, 107 aa, Artificial Sequence
  Description of Artificial Sequence: Synthetic polypeptide
DIQMTQSPSSLSASVGDRVTITCRASQSISTYLNWYQQKPGKAPKLLIYDASNLETGVPSRFSGSGSGTDFTLTISSLQPEDFATYYCQQSYTIPITFGQGTRLEIK

SEQ ID NO: 456 - protein, 121 aa, Artificial Sequence
  Description of Artificial Sequence: Synthetic polypeptide
EVQLLESGGGLVQPGGSLRLSCAASGFTFSDSAMHWVRQAPGKGLEWVSAISGSGSTIYYADSVKGRFTISRDNSKNTLYLQMNSLRAEDTAVYYCVSDIAVAGHWYFDLWGRGTLVTVSS

SEQ ID NO: 457 - protein, 107 aa, Artificial Sequence
  Description of Artificial Sequence: Synthetic polypeptide
DIQMTQSPSSLSASVGDRVTITCRASQSISTFLNWYQQKPGKAPKLLIYAASRLEGGVPSRFSGSGSGTDFTLTISSLQPEDFATYYCQQANSFPLTFGPGTKVDIK

SEQ ID NO: 458 - protein, 122 aa, Artificial Sequence
  Description of Artificial Sequence: Synthetic polypeptide
EVQLVESGGGLVKPGGSLRLSCAASGFTFSSYWMSWVRQAPGKGLEWVSYISGDSGYTNYAAPVKGRFTISRDDSKNTLYLQMNSLKTEDTAVYYCARANSSGWYDWYFDLWGRGTLVTVSS

SEQ ID NO: 459 - protein, 107 aa, Artificial Sequence [sequence omitted]

SEQ ID NO: 460 - protein, 123 aa, Artificial Sequence
  Description of Artificial Sequence: Synthetic polypeptide
EVQLLESGGGLVQPGGSLRLSCAASGFTFDDYAMHWVRQAPGKGLEWVSGISWNSGSIGYADSVKGRFTISRDNSKNTLYLQMNSLRAEDTAVYYCAKDIVAAGHYYYGMDVWGQGTTVTVSS

SEQ ID NO: 461 - protein, 107 aa, Artificial Sequence
  Description of Artificial Sequence: Synthetic polypeptide
DIQMTQSPSSLSASVGDRVTITCQASQDISNYLNWYQQKPGKAPKLLIYDASNLETGVPSRFSGSGSGTDFTLTISSLQPEDFATYYCQQSYSTPLTFGGGTKVEIK

SEQ ID NO: 462 - protein, 121 aa, Artificial Sequence
  Description of Artificial Sequence: Synthetic polypeptide
EVQLLESGGGLVQPGGSLRLSCAASGFTFDDYAMHWVRQAPGKGLEWVSYIDTSSSHLYYADSVKGRFTISRDNSKNTLYLQMNSLRAEDTAVYYCARDEAAAGYYGMDVWGQGTTVTVSS

SEQ ID NO: 463 - protein, 107 aa, Artificial Sequence
  Description of Artificial Sequence: Synthetic polypeptide
DIQMTQSPSSLSASVGDRVTITCQAGQDISNYLNWYQQKPGKAPKLLIYDASNLETGVPSRFSGSGSGTDFTLTISSLQPEDFATYYCQQTYSTPITFGQGTKLEIK

SEQ ID NO: 464 - protein, 13 aa, Artificial Sequence
  Description of Artificial Sequence: Synthetic peptide
SRISSDGRITTYA

SEQ ID NO: 465 - protein, 18 aa, Artificial Sequence
  Description of Artificial Sequence: Synthetic peptide
CARGTSYCTGGVCDIDYW

SEQ ID NO: 466 - protein, 11 aa, Artificial Sequence
  Description of Artificial Sequence: Synthetic peptide
RASQSIGRNLN

SEQ ID NO: 467 - protein, 5 aa, Artificial Sequence
  Description of Artificial Sequence: Synthetic peptide
SNLQS

SEQ ID NO: 468 - protein, 9 aa, Artificial Sequence
  Description of Artificial Sequence: Synthetic peptide
QQSYSIPLT

SEQ ID NO: 469 - protein, 123 aa, Artificial Sequence
  Description of Artificial Sequence: Synthetic polypeptide
EVQLVESGGGLVKPGGSLRLSCAASGFTFSSYWMSWVRQAPGKGLEWVSRISSDGRITTYAAPVKGRFTISRDDSKNTLYLQMNSLKTEDTAVYYCARGTSYCTGGVCDIDYWGQGTLVTVSS

SEQ ID NO: 470 - protein, 107 aa, Artificial Sequence
  Description of Artificial Sequence: Synthetic polypeptide
DIQMTQSPSSLSASVGDRVTITCRASQSIGRNLNWYQQKPGKAPKLLIYSASNLQSGVPSRFSGSGSGTDFTLTISSLQPEDFATYYCQQSYSIPLTFGPGTKVDIK

SEQ ID NO: 471 - protein, 120 aa, Artificial Sequence
  Description of Artificial Sequence: Synthetic polypeptide
EVQLLESGGGLVQPGGSLRLSCAASGFTFSNAWMSWVRQAPGKGLEWVSTIVGNGGATYYADSVKGRFTISRDNSKNTLYLQMNSLRAEDTAVYYCARDNPLRWQGMDVWGQGTLVTVSS

SEQ ID NO: 472 - protein, 107 aa, Artificial Sequence
  Description of Artificial Sequence: Synthetic polypeptide
DIQMTQSPSSLSASVGDRVTITCRASQDISNYLNWYQQKPGKAPKLLIYAASSLQSGVPSRFSGSGSGTDFTLTISSLQPEDFATYYCQQSYSIPPTFGPGTKVDIK

SEQ ID NO: 473 - protein, 9 aa, Artificial Sequence
  Description of Artificial Sequence: Synthetic peptide
FTFSSYAMS

SEQ ID NO: 474 - protein, 5 aa, Artificial Sequence
  Description of Artificial Sequence: Synthetic peptide
SGLQS

SEQ ID NO: 475 - protein, 122 aa, Artificial Sequence
  Description of Artificial Sequence: Synthetic polypeptide
EVQLLESGGGLVQPGGSLRLSCAASGFTFSSYAMSWVRQAPGKGLEWVSYISSSSTYTNYADSVKGRFTISRDNSKNTLYLQMNSLRAEDTAVYYCARANSSSWYDWYFDLWGQGTLVTVSS

SEQ ID NO: 476 - protein, 107 aa, Artificial Sequence
  Description of Artificial Sequence: Synthetic polypeptide
DIQMTQSPSSLSASVGDRVTITCRASQSISSYLNWYQQKPGKAPKLLIYAASGLQSGVPSRFSGSGSGTDFTLTISSLQPEDFATYYCQQSYSTPLTFGGGTKVEIK

SEQ ID NO: 477 - protein, 122 aa, Artificial Sequence
  Description of Artificial Sequence: Synthetic polypeptide
EVQLLESGGGLVQPGGSLRLSCAASGFTFSSYQMSWVRQAPGKGLEWVSYISSSSTYTNYADSVKGRFTISRDNSKNTLYLQMNSLRAEDTAVYYCARANSSSWYDWYFDLWGQGTLVTVSS

SEQ ID NO: 478 - protein, 123 aa, Artificial Sequence
  Description of Artificial Sequence: Synthetic polypeptide
EVQLLESGGGLVQPGGSLRLSCAASGFTFSSYAMHWVRQAPGKGLEWVSGISGSGGSAYYADSVKGRFTISRDNSKNTLYLQMNSLRAEDTAVYYCATSQAPVDYYYYGMDVWGQGTTVTVSS

SEQ ID NO: 479 - protein, 107 aa, Artificial Sequence
  Description of Artificial Sequence: Synthetic polypeptide
DIQMTQSPSSLSASVGDRVTITCRASQSISSWLAWYQQKPGKAPKLLIYAASNLQRGVPSRFSGSGSGTDFTLTISSLQPEDFATYYCQQSYSIPITFGQGTKVEIK

SEQ ID NO: 480 - protein, 122 aa, Artificial Sequence
  Description of Artificial Sequence: Synthetic polypeptide
EVQLVESGGGLVKPGGSLRLSCAASGFTFSSYWMSWVRQAPGKGLEWVSYISGSSSYTNYAAPVKGRFTISRDDSKNTLYLQMNSLKTEDTAVYYCARVGSSGWYDWYFDLWGRGTLVTVSS

SEQ ID NO: 481 - protein, 107 aa, Artificial Sequence [sequence omitted]

SEQ ID NO: 482 - protein, 118 aa, Artificial Sequence
  Description of Artificial Sequence: Synthetic polypeptide
QVQLVQSGAEVKKPGASVKVSCKASGYTLTTWYMYWVRQAPGQGLEWMGWINPNRGATNYAQKFQGRVTMTRDTSTSTVYMELSSLRSEDTAVYYCAKGDLWGAMDVWGQGTTVTVSS

SEQ ID NO: 483 - protein, 129 aa, Artificial Sequence
  Description of Artificial Sequence: Synthetic polypeptide
QVQLVQSGAEVKKPGASVKVSCKASGYTFTGYYIHWVRQAPGQGLEWMGWMNPNSGNTGYAQKFQGRVTMTRDTSTSTVYMELSSLRSEDTAVYYCARDPGFLGYCSGGSCYDGWFDPWGQGTLVTVSS

SEQ ID NO: 484 - protein, 107 aa, Artificial Sequence
  Description of Artificial Sequence: Synthetic polypeptide
DIQMTQSPSSLSASVGDRVTITCRASQSISSYLHWYQQKPGKAPKLLIYAASSLQSGVPSRFSGSGSGTDFTLTISSLQPEDFATYYCQQSYTAPYTFGQGTKLEIK

SEQ ID NO: 485 - protein, 24 aa, Artificial Sequence
  Description of Artificial Sequence: Synthetic peptide
CARDPGFLGYSSGGSCYDGWFDPW

SEQ ID NO: 486 - protein, 129 aa, Artificial Sequence
  Description of Artificial Sequence: Synthetic polypeptide
QVQLVQSGAEVKKPGASVKVSCKASGYTFTGYYIHWVRQAPGQGLEWMGWMNPNSGNTGYAQKFQGRVTMTRDTSTSTVYMELSSLRSEDTAVYYCARDPGFLGYSSGGSSYDGWFDPWGQGTLVTVSS

SEQ ID NO: 487 - protein, 9 aa, Artificial Sequence
  Description of Artificial Sequence: Synthetic peptide
FTFDDYALH

SEQ ID NO: 488 - protein, 13 aa, Artificial Sequence
  Description of Artificial Sequence: Synthetic peptide
SAISGDGRSTTYA

SEQ ID NO: 489 - protein, 17 aa, Artificial Sequence
  Description of Artificial Sequence: Synthetic peptide
CARDGTVNGATGWFDPW

SEQ ID NO: 490 - protein, 11 aa, Artificial Sequence
  Description of Artificial Sequence: Synthetic peptide
QASQDISKYLN

SEQ ID NO: 491 - protein, 5 aa, Artificial Sequence
  Description of Artificial Sequence: Synthetic peptide
SNLET

SEQ ID NO: 492 - protein, 9 aa, Artificial Sequence
  Description of Artificial Sequence: Synthetic peptide
QQSYSIPFT

SEQ ID NO: 493 - protein, 122 aa, Artificial Sequence
  Description of Artificial Sequence: Synthetic polypeptide
EVQLLESGGGLVQPGGSLRLSCAASGFTFDDYALHWVRQAPGKGLEWVSAISGDGRSTTYADSVKGRFTISRDNSKNTLYLQMNSLRAEDTAVYYCARDGTVNGATGWFDPWGQGTLVTVSS

SEQ ID NO: 494 - protein, 107 aa, Artificial Sequence
  Description of Artificial Sequence: Synthetic polypeptide
DIQMTQSPSSLSASVGDRVTITCQASQDISKYLNWYQQKPGKAPKLLIYDASNLETGVPSRFSGSGSGTDFTLTISSLQPEDFATYYCQQSYSIPFTFGPGTKVDIK

SEQ ID NO: 495 - protein, 9 aa, Artificial Sequence
  Description of Artificial Sequence: Synthetic peptide
FTFSDYGMP

SEQ ID NO: 496 - protein, 121 aa, Artificial Sequence
  Description of Artificial Sequence: Synthetic polypeptide
EVQLLESGGGLVQPGGSLRLSCAASGFTFSDYGMPWVRQAPGKGLEWVSAISGSGGSTYYADSVKGRFTISRDNSKNTLYLQMNSLRAEDTAVYYCARDGGWQPAAILDYWGQGTLVTVSS

SEQ ID NO: 497 - protein, 107 aa, Artificial Sequence
  Description of Artificial Sequence: Synthetic polypeptide
DIQMTQSPSSLSASVGDRVTITCRASQGISNNLNWYQQKPGKAPKLLIYDASNLETGVPSRFSGSGSGTDFTLTISSLQPEDFATYYCQQSYSTPLTFGQGTKVEIK

SEQ ID NO: 498 - protein, 118 aa, Artificial Sequence
  Description of Artificial Sequence: Synthetic polypeptide
QVQLVQSGAEVKKPGASVKVSCKASGYTFTDYFLHWVRQAPGQGLEWMGWMNPTSGNTGYAQKFQGRVTMTRDTSTSTVYMELSSLRSEDTAVYYCAREGEGSGFDYWGQGTLVTVSS

SEQ ID NO: 499 - protein, 107 aa, Artificial Sequence
  Description of Artificial Sequence: Synthetic polypeptide
DIQMTQSPSSLSASVGDRVTITCRASQGINSWLAWYQQKPGKAPKLLIYDASNLETGVPSRFSGSGSGTDFTLTISSLQPEDFATYYCQQSYSTPLTFGGGTKVEIK

SEQ ID NO: 500 - protein, 120 aa, Artificial Sequence
  Description of Artificial Sequence: Synthetic polypeptide
QVQLVQSGAEVKKPGASVKVSCKASGYTFTSYYMHWVRQAPGQGLEWMAWMNPNSGNTGYAQKFQGRVTMTRDTSTSTVYMELSSLRSEDTAVYYCARDYDFWSGSLGYWGQGTLVTVSS

SEQ ID NO: 501 - protein, 107 aa, Artificial Sequence
  Description of Artificial Sequence: Synthetic polypeptide
DIQMTQSPSSLSASVGDRVTITCRASQGISNYLAWYQQKPGKAPKLLIYAASSLQSGVPSRFSGSGSGTDFTLTISSLQPEDFATYYCQQSYSTPWTFGQGTKVEIK

SEQ ID NO: 502 - protein, 125 aa, Artificial Sequence
  Description of Artificial Sequence: Synthetic polypeptide
QVQLVQSGAEVKKPGASVKVSCKASGYTFTSYYMHWVRQAPGQGLEWMGIINPSGGSTSYAQKFQGRVTMTRDTSTSTVYMELSSLRSEDTAVYYCARDTGYSYGRYYYYGMDVWGQGTLVTVSS

SEQ ID NO: 503 - protein, 107 aa, Artificial Sequence
  Description of Artificial Sequence: Synthetic polypeptide
DIQMTQSPSSLSASVGDRVTITCRASQSIGRWLAWYQQKPGKAPKLLIYDASNLQSGVPSRFSGSGSGTDFTLTISSLQPEDFATYYCQQSYSIPITFGQGTKVEIK

SEQ ID NO: 504 - protein, 121 aa, Artificial Sequence
  Description of Artificial Sequence: Synthetic polypeptide
QVQLVQSGAEVKKPGASVKVSCKASGYTLTDYYMHWVRQAPGQGLEWMGIINPSGGSTSYAQKFQGRVTMTRDTSTSTVYMELSSLRSEDTAVYYCAREEYSSSSGYFDYWGQGTLVTVSS

SEQ ID NO: 505 - protein, 107 aa, Artificial Sequence
  Description of Artificial Sequence: Synthetic polypeptide
DIQMTQSPSSLSASVGDRVTITCRASQGISSWLAWYQQKPGKAPKLLIYAASSLQSGVPSRFSGSGSGTDFTLTISSLQPEDFATYYCQQSYSTPLTFGQGTKVEIK

SEQ ID NO: 506 - protein, 120 aa, Artificial Sequence
  Description of Artificial Sequence: Synthetic polypeptide
QVQLVQSGAEVKKPGASVKVSCKASGYTFTSYGISWVRQAPGQGLEWMGWMHPKSGDTGLTQKFQGRVTMTRDTSTSTVYMELSSLRSEDTAVYYCARDTPYYYYGMDVWGQGTTVTVSS

SEQ ID NO: 507 - protein, 107 aa, Artificial Sequence
  Description of Artificial Sequence: Synthetic polypeptide
DIQMTQSPSSLSASVGDRVTITCRASQSISSWLAWYQQKPGKAPKLLIYAASSLQSGVPSRFSGSGSGTDFTLTISSLQPEDFATYYCQQSYSVPITFGQGTKVEIK

SEQ ID NO: 508 - protein, 14 aa, Artificial Sequence
  Description of Artificial Sequence: Synthetic peptide
CAKERFIDYGMDVW

SEQ ID NO: 509 - protein, 8 aa, Artificial Sequence
  Description of Artificial Sequence: Synthetic peptide
QQTYSGWT

SEQ ID NO: 510 - protein, 119 aa, Artificial Sequence
  Description of Artificial Sequence: Synthetic polypeptide
EVQLLESGGGLVQPGGSLRLSCAASGFTFSSYAMSWVRQAPGKGLEWVSAISGSGGSTYYADSVKGRFTISRDNSKNTLYLQMNSLRAEDTAVYYCAKERFIDYGMDVWGQGTTVTVSS

SEQ ID NO: 511 - protein, 106 aa, Artificial Sequence
  Description of Artificial Sequence: Synthetic polypeptide
DIQMTQSPSSLSASVGDRVTITCQASQDISNYLNWYQQKPGKAPKLLIYAASSLQSGVPSRFSGSGSGTDFTLTISSLQPEDFATYYCQQTYSGWTFGPGTKVDIK

SEQ ID NO: 512 - protein, 121 aa, Artificial Sequence
  Description of Artificial Sequence: Synthetic polypeptide
EVQLVESGGGLVKPGGSLRLSCAASGFTFGDYAMSWVRQAPGKGLEWVSYISGDIGYTNYAAPVKGRFTISRDDSKNTLYLQMNSLKTEDTAVYYCARDVAATGNWYFDLWGRGTLVTVSS

SEQ ID NO: 513 - protein, 123 aa, Artificial Sequence
  Description of Artificial Sequence: Synthetic polypeptide
EVQLLESGGGLVQPGGSLRLSCAASGFSFSSYTMNWVRQAPGKGLEWVSFITSSSRTIYYADSVKGRFTISRDNSKNTLYLQMNSLRAEDTAVYYCARDRRGDYGDSWYFDLWGRGTLVTVSS

SEQ ID NO: 514 - protein, 107 aa, Artificial Sequence
  Description of Artificial Sequence: Synthetic polypeptide
EIVMTQSPATLSVSPGERATLSCRASQSVRNYLAWYQQKPGQAPRLLIYGASTRATGIPARFSGSGSGTEFTLTISSLQSEDFAVYYCQQYGSSPLTFGGGTKVEIK

SEQ ID NO: 515 - protein, 121 aa, Artificial Sequence
  Description of Artificial Sequence: Synthetic polypeptide
QVQLVQSGAEVKKPGASVKVSCKASGYTFSKHFVHWVRQAPGQGLEWMGWMNPNSGNSGYAQKFQGRVTMTRDTSTSTVYMELSSLRSEDTAVYYCARGEGGYYYYGMDVWGQGTLVTVSS

SEQ ID NO: 516 - protein, 107 aa, Artificial Sequence
  Description of Artificial Sequence: Synthetic polypeptide
DIQMTQSPSSLSASVGDRVTITCRASQSISSWLAWYQQKPGKAPKLLIYAASTLQSGVPSRFSGSGSGTDFTLTISSLQPEDFATYYCQQSYSTPWTFGQGTKVEIK

SEQ ID NO: 517 - protein, 120 aa, Artificial Sequence
  Description of Artificial Sequence: Synthetic polypeptide
EVQLLESGGGLVQPGGSLRLSCAASGFTFGSYSMSWVRQAPGKGLEWVSAIGTGGGTYYADSVKGRFTISRDNSKNTLYLQMNSLRAEDTAVYYCAKGTPYYYYYGMDVWGQGTMVTVSS

SEQ ID NO: 518 - protein, 107 aa, Artificial Sequence
  Description of Artificial Sequence: Synthetic polypeptide
DIQMTQSPSSLSASVGDRVTITCRASQPLSNWLAWYQQKPGKAPKLLIYAASSLQSGVPSRFSGSGSGTDFTLTISSLQPEDFATYYCQQAISFPLTFGGGTKVEIK

SEQ ID NO: 519 - protein, 125 aa, Artificial Sequence
  Description of Artificial Sequence: Synthetic polypeptide
QVQLVQSGAEVKKPGASVKVSCKASGYTFTSYYMHWVRQAPGQGLEWMGWMNPNSGNTGYAQKFQGRVTMTRDTSTSTVYMELSSLRSEDTAVYYCARDLGYYDSSGYFGAFDIWGQGTTVTVSS

SEQ ID NO: 520 - protein, 107 aa, Artificial Sequence
  Description of Artificial Sequence: Synthetic polypeptide
DIQMTQSPSSLSASVGDRVTITCQSSEDISSSLNWYQQKPGKAPKLLIYAASSLQIGVPSRFSGSGSGTDFTLTISSLQPEDFATYYCQQTYSTPYTFGQGTKVEIK

SEQ ID NO: 521 - protein, 122 aa, Artificial Sequence
  Description of Artificial Sequence: Synthetic polypeptide
QVQLVQSGAEVKKPGASVKVSCKASGYTFTSYGISWVRQAPGQGLEWMGIINPRGGSTIFAQKFQGRVTMTRDTSTSTVYMELSSLRSEDTAVYYCARGTRSSGWYGWFDPWGQGTLVTVSS

SEQ ID NO: 522 - protein, 107 aa, Artificial Sequence
  Description of Artificial Sequence: Synthetic polypeptide
DIQMTQSPSSLSASVGDRVTITCRASQGIGNWLAWYQQKPGKAPKLLIYAASNLETGVPSRFSGSGSGTDFTLTISSLQPEDFATYYCQQIHSYPLTFGGGTKVEIK

SEQ ID NO: 523 - protein, 120 aa, Artificial Sequence
  Description of Artificial Sequence: Synthetic polypeptide
EVQLVESGGGLVKPGGSLRLSCAASGFIFQDSAIHWVRQAPGKGLEWVSAIGTGGGTYYAAPVKGRFTISRDDSKNTLYLQMNSLKTEDTAVYYCARSYCSGGSCSLGSWGQGTLVTVSS

SEQ ID NO: 524 - protein, 112 aa, Artificial Sequence
  Description of Artificial Sequence: Synthetic polypeptide
DIVMTQSPLSLPVTPGEPASISCRSSQSLLHSNGYNYLDWYLQKPGQSPQLLIYDASNLETGVPDRFSGSGSGTDFTLKISRVEAEDVGVYYCMQALQTPLTFGQGTKVEIK

SEQ ID NO: 525 - protein, 121 aa, Artificial Sequence
  Description of Artificial Sequence: Synthetic polypeptide
EVQLLESGGGLVQPGGSLRLSCAASGFTFDDYGMSWVRQAPGKGLEWVSYISSSSSYIYYADSVKGRFTISRDNSKNTLYLQMNSLRAEDTAVYYCAREIAAAGFYGMDVWGQGTTVTVSS

SEQ ID NO: 526 - protein, 23 aa, Artificial Sequence
  Description of Artificial Sequence: Synthetic peptide
CAREGLGYCTNGVCWNYYGMDVW

SEQ ID NO: 527 - protein, 9 aa, Artificial Sequence
  Description of Artificial Sequence: Synthetic peptide
QQSYSTPYT

SEQ ID NO: 528 - protein, 128 aa, Artificial Sequence
  Description of Artificial Sequence: Synthetic polypeptide
QVQLVQSGAEVKKPGASVKVSCKASGYTFTSYYMHWVRQAPGQGLEWMGWMNPNSGNTGYAQKFQGRVTMTRDTSTSTVYMELSSLRSEDTAVYYCAREGLGYCTNGVCWNYYGMDVWGQGTLVTVSS

SEQ ID NO: 529 - protein, 107 aa, Artificial Sequence
  Description of Artificial Sequence: Synthetic polypeptide
DIQMTQSPSSLSASVGDRVTITCRASQGISSWLAWYQQKPGKAPKLLIYGASSLQSGVPSRFSGSGSGTDFTLTISSLQPEDFATYYCQQSYSTPYTFGQGTKVEIK

SEQ ID NO: 530 - protein, 126 aa, Artificial Sequence
  Description of Artificial Sequence: Synthetic polypeptide
QVQLVQSGAEVKKPGSSVKVSCKASGGTLSRYGVSWVRQAPGQGLEWMGGIIPIFGTTNYAQKFQGRVTITADESTSTAYMELSSLRSEDTAVYYCARDRVYYDSSGYPTWYFDLWGRGTLVTVSS

SEQ ID NO: 531 - protein, 108 aa, Artificial Sequence
  Description of Artificial Sequence: Synthetic polypeptide
EIVMTQSPATLSVSPGERATLSCRASQSVSSSYLAWYQQKPGQAPRLLIYGASTRATGIPARFSGSGSGTEFTLTISSLQSEDFAVYYCQQYGSSPITFGQGTKVEIK

SEQ ID NO: 532 - protein, 121 aa, Artificial Sequence
  Description of Artificial Sequence: Synthetic polypeptide
EVQLLESGGGLVQPGGSLRLSCAASGFTFDDFAMHWVRQAPGKGLEWVSGISGNGDSRYYADSVKGRFTISRDNSKNTLYLQMNSLRAEDTAVYYCARDASYGGNYGMDVWGQGTTVTVSS

SEQ ID NO: 533 - protein, 107 aa, Artificial Sequence
  Description of Artificial Sequence: Synthetic polypeptide
DIQMTQSPSSLSASVGDRVTITCQASQDIRNYLNWYQQKPGKAPKLLIYKASTLESGVPSRFSGSGSGTDFTLTISSLQPEDFATYYCQQANSFPLTFGPGTKVDIK

SEQ ID NO: 534 - protein, 119 aa, Artificial Sequence
  Description of Artificial Sequence: Synthetic polypeptide
EVQLVESGGGLVKPGGSLRLSCAASGFTFSSYWMSWVRQAPGKGLEWVSAIGTGGGTYYAAPVKGRFTISRDDSKNTLYLQMNSLKTEDTAVYYCAREWLVPYYGMDVWGQGTTVTVSS

SEQ ID NO: 535 - protein, 107 aa, Artificial Sequence
  Description of Artificial Sequence: Synthetic polypeptide
DIQMTQSPSSLSASVGDRVTITCRASQSISRWLAWYQQKPGKAPKLLIYGASNLQSGVPSRFSGSGSGTDFTLTISSLQPEDFATYYCQQSYSTPWTFGQGTKVEIK

SEQ ID NO: 536 - protein, 120 aa, Artificial Sequence
  Description of Artificial Sequence: Synthetic polypeptide
EVQLLESGGGLVQPGGSLRLSCAASGFSVSSNYMSWVRQAPGKGLEWVAGISYDGSSKPYADSVKGRFTISRDNSKNTLYLQMNSLRAEDTAVYYCARSRGIAARPLQHWGQGTLVTVSS

SEQ ID NO: 537 - protein, 113 aa, Artificial Sequence
  Description of Artificial Sequence: Synthetic polypeptide
DIVMTQSPDSLAVSLGERATINCKSSQSVLYSSNNKNYLAWYQQKPGQPPKLLIYWASTRQSGVPDRFSGSGSGTDFTLTISSLQAEDVAVYYCHQYYGHPPTFGGGTKVEIK

SEQ ID NO: 538 - protein, 113 aa, Artificial Sequence
  Description of Artificial Sequence: Synthetic polypeptide
DIVMTQSPDSLAVSLGERATINCKSSQSVLYSSNNKNYLAWYQQKPGQPPKLLIYQASTRQSGVPDRFSGSGSGTDFTLTISSLQAEDVAVYYCHQYYGHPPTFGGGTKVEIK

SEQ ID NO: 539 - protein, 121 aa, Artificial Sequence
  Description of Artificial Sequence: Synthetic polypeptide
EVQLLESGGGLVQPGGSLRLSCAASGFSFSDYGMHWVRQAPGKGLEWVSAISGSGGSTYYADSVKGRFTISRDNSKNTLYLQMNSLRAEDTAVYYCARDGGWQPAAILDYWGQGTLVTVSS

SEQ ID NO: 540 - protein, 107 aa, Artificial Sequence
  Description of Artificial Sequence: Synthetic polypeptide
DIQMTQSPSSLSASVGDRVTITCRASQGISNNLNWYQQKPGKAPKLLIYDASNLETGVPSRFSGSGSGTDFTLTISSLQPEDFATYYCQQSYSTPLTFGGGTKVEIK

SEQ ID NO: 541 - protein, 120 aa, Artificial Sequence
  Description of Artificial Sequence: Synthetic polypeptide
EVQLLESGGGLVQPGGSLRLSCAASGFTFSDHGMHWVRQAPGKGLEWVSVIYGGESTYYADSVKGRFTISRDNSKNTLYLQMNSLRAEDTAVYYCARDPAVAGGGIFDYWGQGTLVTVSS

SEQ ID NO: 542 - protein, 107 aa, Artificial Sequence
  Description of Artificial Sequence: Synthetic polypeptide
DIQMTQSPSSLSASVGDRVTITCRASQGISNYLAWYQQKPGKAPKLLIYDASNLETGVPSRFSGSGSGTDFTLTISSLQPEDFATYYCQQSYSTCYTFGQGTKLEIK

SEQ ID NO: 543 - protein, 122 aa, Artificial Sequence
  Description of Artificial Sequence: Synthetic polypeptide
QVQLVQSGAEVKKPGASVKVSCKASGDTFTGYYIHWVRQAPGQGLEWMGWINPNSGGTNYAQKFQGRVTMTRDTSTSTVYMELSSLRSEDTAVYYCARSGLWLGSYYGMDVWGQGTLVTVSS

SEQ ID NO: 544 - protein, 107 aa, Artificial Sequence
  Description of Artificial Sequence: Synthetic polypeptide
DIQMTQSPSSLSASVGDRVTITCRASQTISIWLAWYQQKPGKAPKLLIYDASTLQSGVPSRFSGSGSGTDFTLTISSLQPEDFATYYCQQYSSYPLTFGQGTKVEIK

SEQ ID NO: 545 - protein, 119 aa, Artificial Sequence
  Description of Artificial Sequence: Synthetic polypeptide
QVQLVQSGAEVKKPGASVKVSCKASGYTFTSYDINWVRQAPGQGLEWMGWINPNSGTTGYAQKFQGRVTMTRDTSTSTVYMELSSLRSEDTAVYYCARSPYYYYGMDVWGQGTTVTVSS

SEQ ID NO: 546 - protein, 106 aa, Artificial Sequence
  Description of Artificial Sequence: Synthetic polypeptide
DIQMTQSPSSLSASVGDRVTITCRASHFISRWVAWYQQKPGKAPKLLIYAASTLQSGVPSRFSGSGSGTDFTLTISSLQPEDFATYYCQQSYSGISFGPGTKVDIK

SEQ ID NO: 547 - protein, 119 aa, Artificial Sequence
  Description of Artificial Sequence: Synthetic polypeptide
EVQLLESGGGLVQPGGSLRLSCAASGFTFNNYGMNWVRQAPGKGLEWVSRINSDGSSTSYADSVKGRFTISRDNSKNTLYLQMNSLRAEDTAVYYCARGAYYYYYMDVWGQGTLVTVSS

SEQ ID NO: 548 - protein, 107 aa, Artificial Sequence
  Description of Artificial Sequence: Synthetic polypeptide
EIVMTQSPATLSVSPGERATLSCRASQSVSGSYLAWYQQKPGQAPRLLIYATSSRASGIPARFSGSGSGTEFTLTISSLQSEDFAVYYCQQYYSGLTFGQGTKVEIK

SEQ ID NO: 549 - protein, 122 aa, Artificial Sequence
  Description of Artificial Sequence: Synthetic polypeptide
EVQLLESGGGLVQPGGSLRLSCAASGFTFSNSDMNWVRQAPGKGLEWVAHIWNDGSQKYYADSVKGRFTISRDNSKNTLYLQMNSLRAEDTAVYYCARDRTDPGYSSAMDVWGQGTTVTVSS

SEQ ID NO: 550 - protein, 107 aa, Artificial Sequence
  Description of Artificial Sequence: Synthetic polypeptide
DIQMTQSPSSLSASVGDRVTITCRASQDIRNYLGWYQQKPGKAPKLLIYDASSLETGVPSRFSGSGSGTDFTLTISSLQPEDFATYYCQQATSLPLTFGGGTKVEIK

SEQ ID NO: 551 - protein, 120 aa, Artificial Sequence
  Description of Artificial Sequence: Synthetic polypeptide
QVQLVQSGAEVKKPGASVKVSCKASGYTFTSYDINWVRQAPGQGLEWMGWMNPNSGNTGYAQKFQGRVTMTRDTSTSTVYMELSSLRSEDTAVYYCAKDSDYSNLLWDYWGQGTLVTVSS

SEQ ID NO: 552 - protein, 107 aa, Artificial Sequence
  Description of Artificial Sequence: Synthetic polypeptide
DIQMTQSPSSLSASVGDRVTITCRASQDITNDLGWYQQKPGKAPKLLIYQASSLESGVPSRFSGSGSGTDFTLTISSLQPEDFATYYCQQSYTIPLTFGQGTKVEIK

SEQ ID NO: 553 - protein, 19 aa, Artificial Sequence
  Description of Artificial Sequence: Synthetic peptide
CARDGAWFGEEYYYGMDVW

SEQ ID NO: 554 - protein, 11 aa, Artificial Sequence
  Description of Artificial Sequence: Synthetic peptide
RASQGISNWLA

SEQ ID NO: 555 - protein, 10 aa, Artificial Sequence
  Description of Artificial Sequence: Synthetic peptide
QQYYSFPLYT

SEQ ID NO: 556 - protein, 124 aa, Artificial Sequence
  Description of Artificial Sequence: Synthetic polypeptide
QVQLVQSGAEVKKPGASVKVSCKASGYTFTGHYMHWVRQAPGQGLEWMGIINPSGGSTSYAQKFQGRVTMTRDTSTSTVYMELSSLRSEDTAVYYCARDGAWFGEEYYYGMDVWGQGTTVTVSS

SEQ ID NO: 557 - protein, 108 aa, Artificial Sequence
  Description of Artificial Sequence: Synthetic polypeptide
DIQMTQSPSSLSASVGDRVTITCRASQGISNWLAWYQQKPGKAPKLLIYDASNLETGVPSRFSGSGSGTDFTLTISSLQPEDFATYYCQQYYSFPLYTFGQGTKVEIK

SEQ ID NO: 558 - protein, 13 aa, Artificial Sequence
  Description of Artificial Sequence: Synthetic peptide
GMIYPRDGSTSYA

SEQ ID NO: 559 - protein, 13 aa, Artificial Sequence
  Description of Artificial Sequence: Synthetic peptide
CAMTGWGYGMDVW

SEQ ID NO: 560 - protein, 11 aa, Artificial Sequence
  Description of Artificial Sequence: Synthetic peptide
RASQGINNYLA

SEQ ID NO: 561 - protein, 9 aa, Artificial Sequence
  Description of Artificial Sequence: Synthetic peptide
QQSYSAPPT

SEQ ID NO: 562 - protein, 118 aa, Artificial Sequence
  Description of Artificial Sequence: Synthetic polypeptide
QVQLVQSGAEVKKPGASVKVSCKASGYTFTGYYMHWVRQAPGQGLEWMGMIYPRDGSTSYAQKFQGRVTMTRDTSTSTVYMELSSLRSEDTAVYYCAMTGWGYGMDVWGKGTTVTVSS

SEQ ID NO: 563 - protein, 107 aa, Artificial Sequence
  Description of Artificial Sequence: Synthetic polypeptide
DIQMTQSPSSLSASVGDRVTITCRASQGINNYLAWYQQKPGKAPKLLIYDASTLQSGVPSRFSGSGSGTDFTLTISSLQPEDFATYYCQQSYSAPPTFGQGTKLEIK

SEQ ID NO: 564 - protein, 121 aa, Artificial Sequence
  Description of Artificial Sequence: Synthetic polypeptide
EVQLLESGGGLVQPGGSLRLSCAASGFTFGDYAMSWVRQAPGKGLEWVAVVSYDGTNKYYADSVKGRFTISRDNSKNTLYLQMNSLRAEDTAVYYCAKDICSSTSCYFDLWGRGTLVTVSS

SEQ ID NO: 565 - protein, 107 aa, Artificial Sequence
  Description of Artificial Sequence: Synthetic polypeptide
DIQMTQSPSSLSASVGDRVTITCRASQNINNYVNWYQQKPGKAPKLLIYDASNLETGVPSRFSGSGSGTDFTLTISSLQPEDFATYYCQQANSFPPTFGQGTRLEIK

SEQ ID NO: 566 - protein, 122 aa, Artificial Sequence
  Description of Artificial Sequence: Synthetic polypeptide
QVQLVQSGAEVKKPGASVKVSCKASGYTFTSYYMHWVRQAPGQGLEWMGIIDPSGGSTSYAQKFQGRVTMTRDTSTSTVYMELSSLRSEDTAVYYCAREEWSSGGVGYFDYWGQGTLVTVSS

SEQ ID NO: 567 - protein, 107 aa, Artificial Sequence
  Description of Artificial Sequence: Synthetic polypeptide
DIQMTQSPSSLSASVGDRVTITCRASQGISSYLAWYQQKPGKAPKLLIYATSSLQTGVPSRFSGSGSGTDFTLTISSLQPEDFATYYCQQTYSIPITFGQGTRLEIK

SEQ ID NO: 568 - protein, 9 aa, Artificial Sequence
  Description of Artificial Sequence: Synthetic peptide
YPFTDYYMH

SEQ ID NO: 569 - protein, 13 aa, Artificial Sequence
  Description of Artificial Sequence: Synthetic peptide
GWIKPNSGDTEYA

SEQ ID NO: 570 - protein, 20 aa, Artificial Sequence
  Description of Artificial Sequence: Synthetic peptide
CARDRFVGKPDYYYYGMDVW

SEQ ID NO: 571 - protein, 11 aa, Artificial Sequence
  Description of Artificial Sequence: Synthetic peptide
RASQSISVWLA

SEQ ID NO: 572 - protein, 9 aa, Artificial Sequence
  Description of Artificial Sequence: Synthetic peptide
QQSYDTPYT

SEQ ID NO: 573 - protein, 125 aa, Artificial Sequence
  Description of Artificial Sequence: Synthetic polypeptide
QVQLVQSGAEVKKPGASVKVSCKASGYPFTDYYMHWVRQAPGQGLEWMGWIKPNSGDTEYAQKFQGRVTMTRDTSTSTVYMELSSLRSEDTAVYYCARDRFVGKPDYYYYGMDVWGQGTMVTVSS

SEQ ID NO: 574 - protein, 107 aa, Artificial Sequence
  Description of Artificial Sequence: Synthetic polypeptide
DIQMTQSPSSLSASVGDRVTITCRASQSISVWLAWYQQKPGKAPKLLIYAASSLQSGVPSRFSGSGSGTDFTLTISSLQPEDFATYYCQQSYDTPYTFGQGTKLEIK

SEQ ID NO: 575 - protein, 124 aa, Artificial Sequence
  Description of Artificial Sequence: Synthetic polypeptide
QVQLVQSGAEVKKPGASVKVSCKASGYTFTSYYMHWVRQAPGQGLEWMGIINPSGGSTSYAQKFQGRVTMTRDTSTSTVYMELSSLRSEDTAVYYCARDSVAGTGGRYYGMDVWGQGTLVTVSS

SEQ ID NO: 576 - protein, 107 aa, Artificial Sequence
  Description of Artificial Sequence: Synthetic polypeptide
DIQMTQSPSSLSASVGDRVTITCRASQGISNYFAWYQQKPGKAPKLLIYAASSLQGGVPSRFSGSGSGTDFTLTISSLQPEDFATYYCQQSYSLPYTFGQGTKLEIK

SEQ ID NO: 577 - protein, 13 aa, Artificial Sequence
  Description of Artificial Sequence: Synthetic peptide
GVINPIGGTTTYA

SEQ ID NO: 578 - protein, 16 aa, Artificial Sequence
  Description of Artificial Sequence: Synthetic peptide
CASGAPSYYYYGMDVW

SEQ ID NO: 579 - protein, 5 aa, Artificial Sequence
  Description of Artificial Sequence: Synthetic peptide
SYLAT

SEQ ID NO: 580 - protein, 121 aa, Artificial Sequence
  Description of Artificial Sequence: Synthetic polypeptide
QVQLVQSGAEVKKPGASVKVSCKASGYTFTSYYMHWVRQAPGQGLEWMGVINPIGGTTTYAQKFQGRVTMTRDTSTSTVYMELSSLRSEDTAVYYCASGAPSYYYYGMDVWGQGTLVTVSS

SEQ ID NO: 581 - protein, 107 aa, Artificial Sequence
  Description of Artificial Sequence: Synthetic polypeptide
DIQMTQSPSSLSASVGDRVTITCRASQSISSYLNWYQQKPGKAPKLLIYGTSYLATGVPSRFSGSGSGTDFTLTISSLQPEDFATYYCQQSYSTPLTFGQGTKVEIK

SEQ ID NO: 582 - protein, 9 aa, Artificial Sequence
  Description of Artificial Sequence: Synthetic peptide
YTFTSNYVH

SEQ ID NO: 583 - protein, 13 aa, Artificial Sequence
  Description of Artificial Sequence: Synthetic peptide
GRINPHSGDTSYA

SEQ ID NO: 584 - protein, 16 aa, Artificial Sequence
  Description of Artificial Sequence: Synthetic peptide
CARAGQLWSDWYFDLW

SEQ ID NO: 585 - protein, 5 aa, Artificial Sequence
  Description of Artificial Sequence: Synthetic peptide
TALRT

SEQ ID NO: 586 - protein, 9 aa, Artificial Sequence
  Description of Artificial Sequence: Synthetic peptide
QQSYSHPLT

SEQ ID NO: 587 - protein, 121 aa, Artificial Sequence
  Description of Artificial Sequence: Synthetic polypeptide
QVQLVQSGAEVKKPGASVKVSCKASGYTFTSNYVHWVRQAPGQGLEWMGRINPHSGDTSYAQKFQGRVTMTRDTSTSTVYMELSSLRSEDTAVYYCARAGQLWSDWYFDLWGRGTLVTVSS

SEQ ID NO: 588 - protein, 107 aa, Artificial Sequence
  Description of Artificial Sequence: Synthetic polypeptide
DIQMTQSPSSLSASVGDRVTITCQASQDIRNYLNWYQQKPGKAPKLLIYAATALRTGVPSRFSGSGSGTDFTLTISSLQPEDFATYYCQQSYSHPLTFGQGTKVEIK

SEQ ID NO: 589 - protein, 118 aa, Artificial Sequence
  Description of Artificial Sequence: Synthetic polypeptide
QVQLVQSGAEVKKPGASVKVSCKASGYTFTGYYMHWVRQAPGQGLEWMGIINPSGGNTKYAQKFQGRVTMTRDTSTSTVYMELSSLRSEDTAVYYCTTADYYYYMDVWGKGTTVTVSS

SEQ ID NO: 590 - protein, 106 aa, Artificial Sequence
  Description of Artificial Sequence: Synthetic polypeptide
DIQMTQSPSSLSASVGDRVTITCRASQGISNYLAWYQQKPGKAPKLLIYAASSLQSGVPSRFSGSGSGTDFTLTISSLQPEDFATYYCQQYYSNADFGQGTKVEIK

SEQ ID NO: 591 - protein, 119 aa, Artificial Sequence
  Description of Artificial Sequence: Synthetic polypeptide
EVQLLESGGGLVQPGGSLRLSCAASGFTFSDFWMHWVRQAPGKGLEWISYISGDSGYTNYADSVKGRFTISRDNSKNTLYLQMNSLRAEDTAVYYCARDRPYYYYMDVWGKGTTVTVSS

SEQ ID NO: 592 - protein, 107 aa, Artificial Sequence
  Description of Artificial Sequence: Synthetic polypeptide
DIQMTQSPSSLSASVGDRVTITCRASQSVSRSLAWYQQKPGKAPKLLIYAASSLQSGVPSRFSGSGSGTDFTLTISSLQPEDFATYYCQQYKSYPVTFGQGTKVEIK

SEQ ID NO: 593 - protein, 122 aa, Artificial Sequence
  Description of Artificial Sequence: Synthetic polypeptide
EVQLLESGGGLVQPGGSLRLSCAASGFTFDDYTMHWVRQAPGKGLEWVSDISGSGGSTYYADSVKGRFTISRDNSKNTLYLQMNSLRAEDTAVYYCAKDVVVAGTPLHFDYWGQGTLVTVSS

SEQ ID NO: 594 - protein, 107 aa, Artificial Sequence
  Description of Artificial Sequence: Synthetic polypeptide
DIQMTQSPSSLSASVGDRVTITCQASQDISNYLNWYQQKPGKAPKLLIYAASYLQSGVPSRFSGSGSGTDFTLTISSLQPEDFATYYCQQAHNYPITFGQGTRLEIK

SEQ ID NO: 595 - protein, 119 aa, Artificial Sequence
  Description of Artificial Sequence: Synthetic polypeptide
EVQLLESGGGLVQPGGSLRLSCAASEFTFSNAWMSWVRQAPGKGLEWVASISSTSAYIDYADSVKGRFTISRDNSKNTLYLQMNSLRAEDTAVYYCAREVVGATTFDYWGQGTLVTVSS

SEQ ID NO: 596 - protein, 107 aa, Artificial Sequence
  Description of Artificial Sequence: Synthetic polypeptide
DIQMTQSPSSLSASVGDRVTITCRASQSISTWLAWYQQKPGKAPKLLIYAASSLQSGVPSRFSGSGSGTDFTLTISSLQPEDFATYYCQQANAFPPTFGQGTRLEIK

SEQ ID NO: 597 - protein, 117 aa, Artificial Sequence
  Description of Artificial Sequence: Synthetic polypeptide
QVQLVQSGAEVKKPGSSVKVSCKASGGTFSSYAISWVRQAPGQGLEWMGWMEPHTGNTRYAQKFQGRVTITADESTSTAYMELSSLRSEDTAVYYCAKGGFSWFDPWGQGTLVTVSS

SEQ ID NO: 598 - protein, 113 aa, Artificial Sequence
  Description of Artificial Sequence: Synthetic polypeptide
DIVMTQSPDSLAVSLGERATINCKSSQSVLYSSNNKNYLAWYQQKPGQPPKLLIYWASTRESGVPDRFSGSGSGTDFTLTISSLQAEDVAVYYCQQYYSTPPTFGQGTRLEIK

SEQ ID NO: 599 - protein, 120 aa, Artificial Sequence
  Description of Artificial Sequence: Synthetic polypeptide
EVQLLESGGGLVKPGGSLRLSCAASGFTFDDYAMHWVRQAPGKGLEWVASITSSSAFIDYAASVKGRFTISRDDSKNTLYLQMNSLKTEDTAVYYCARERVDWNSYFDLWGRGTLVTVSS

SEQ ID NO: 600 - protein, 108 aa, Artificial Sequence
  Description of Artificial Sequence: Synthetic polypeptide
EIVMTQSPATLSVSPGERATLSCRASQGISNSYLAWYQQKPGQAPRLLIYGASTRATGIPARFSGSGSGTEFTLTISSLQSEDFAVYYCQQYYTYPPTFGPGTKVDIK

SEQ ID NO: 601 - protein, 16 aa, Artificial Sequence
  Description of Artificial Sequence: Synthetic peptide
CAKDLGVVVPAALDYW

SEQ ID NO: 602 - protein, 11 aa, Artificial Sequence
  Description of Artificial Sequence: Synthetic peptide
QASQDISNHLN

SEQ ID NO: 603 - protein, 5 aa, Artificial Sequence
  Description of Artificial Sequence: Synthetic peptide
SNLEA

SEQ ID NO: 604 - protein, 121 aa, Artificial Sequence
  Description of Artificial Sequence: Synthetic polypeptide
EVQLLESGGGLVQPGGSLRLSCAASGFTFDDYAMHWVRQAPGKGLEWVSAISGSGGSTYYADSVKGRFTISRDNSKNTLYLQMNSLRAEDTAVYYCAKDLGVVVPAALDYWGQGTTVTVSS

SEQ ID NO: 605 - protein, 107 aa, Artificial Sequence
  Description of Artificial Sequence: Synthetic polypeptide
DIQMTQSPSSLSASVGDRVTITCQASQDISNHLNWYQQKPGKAPKLLIYDASNLEAGVPSRFSGSGSGTDFTLTISSLQPEDFATYYCQQSYSTPLTFGGGTKVEIK

SEQ ID NO: 606 - protein, 119 aa, Artificial Sequence
  Description of Artificial Sequence: Synthetic polypeptide
EVQLLESGGGLVKPGGSLRLSCAASGFAFSSHWMHWVRQAPGKGLEWVAGTSGSGESRDYADFVKGRFTISRDDSKNTLYLQMNSLKTEDTAVYYCARETYYYYYMDVWGKGTTVTVSS

SEQ ID NO: 607 - protein, 107 aa, Artificial Sequence
  Description of Artificial Sequence: Synthetic polypeptide
DIQMTQSPSSLSASVGDRVTITCRASQGISNYLAWYQQKPGKAPKLLIYDAANLEGGVPSRFSGSGSGTDFTLTISSLQPEDFATYYCQQSDIFPPTFGQGTKVEIK

SEQ ID NO: 608 - protein, 119 aa, Artificial Sequence
  Description of Artificial Sequence: Synthetic polypeptide
QVQLVQSGAEVKKPGASVKVSCKASGYTFTRHWIHWVRQAPGQGLEWMGWINVKTGGAGYAQKFQGRVTMTRDTSTSTVYMELSSLRSEDTAVYYCARESSGWYGTDVWGQGTTVTVSS

SEQ ID NO: 609 - protein, 107 aa, Artificial Sequence
  Description of Artificial Sequence: Synthetic polypeptide
DIQMTQSPSSLSASVGDRATITCRASQSISNYLAWYQQKPGKAPKLLIYAASSLQSGVPSRFSGSGSGTDFTLTISSLQPEDFATYYCQQSNSFPLTFGGGTKVEIK

SEQ ID NO: 610 - protein, 120 aa, Artificial Sequence
  Description of Artificial Sequence: Synthetic polypeptide
EVQLLESGGGLVQPGGSLRLSCAASGFTFSSYWMHWVRQAPGKGLEWVAAISYDGKYKDYEDSVKGRFTISRDNSKNTLYLQMNSLRAEDTAVYYCARENKQWLASFDYWGQGTLVTVSS

SEQ ID NO: 611 - protein, 106 aa, Artificial Sequence
  Description of Artificial Sequence: Synthetic polypeptide
DIQMTQSPSSLSASVGDRVTITCQASQDISNFVNWYQQKPGKAPKLLIYAANLRSGVPSRFSGSGSGTDFTLTISSLQPEDFATYYCQQANSFPVTFGPGTKVDIK

SEQ ID NO: 612 - protein, 9 aa, Artificial Sequence
  Description of Artificial Sequence: Synthetic peptide
GTFSSSAIS

SEQ ID NO: 613 - protein, 13 aa, Artificial Sequence
  Description of Artificial Sequence: Synthetic peptide
GWISAYNGYTNYA

SEQ ID NO: 614 - protein, 16 aa, Artificial Sequence
  Description of Artificial Sequence: Synthetic peptide
CASRVHSGGSYPDDYW

SEQ ID NO: 615 - protein, 11 aa, Artificial Sequence
  Description of Artificial Sequence: Synthetic peptide
QASEHIYNYLN

SEQ ID NO: 616 - protein, 9 aa, Artificial Sequence
  Description of Artificial Sequence: Synthetic peptide
QQTDSIPIT

SEQ ID NO: 617 - protein, 121 aa, Artificial Sequence
  Description of Artificial Sequence: Synthetic polypeptide
QVQLVQSGAEVKKPGASVKVSCKASGGTFSSSAISWVRQAPGQGLEWMGWISAYNGYTNYAQKFQGRVTMTRDTSTSTVYMELSSLRSEDTAVYYCASRVHSGGSYPDDYWGQGTLVTVSS

SEQ ID NO: 618 - protein, 107 aa, Artificial Sequence
  Description of Artificial Sequence: Synthetic polypeptide
DIQMTQSPSSLSASVGDRVTITCQASEHIYNYLNWYQQKPGKAPKLLIYAASSLQSGVPSRFSGSGSGTDFTLTISSLQPEDFATYYCQQTDSIPITFGQGTKVEIK

SEQ ID NO: 619 - protein, 10 aa, Artificial Sequence
  Description of Artificial Sequence: Synthetic peptide
GGGGSGGGGS

SEQ ID NO: 620 - protein, 588 aa, Artificial Sequence
  Description of Artificial Sequence: Synthetic polypeptide
EVQLLESGGGLVQPGGSLRLSCAASGFTFNNYAFHWVRQAPGKGLEWVSRINSYGTSTTYADSVKGRFTISRDNSKNTLYLQMNSLRAEDTAVYYCAREGPVAGYWYFDLWGQGTLVTVSSASTKGPSVFPLAPSSKSTSGGTAALGCLVKDYFPEPVTVSWNSGALTSGVHTFPAVLQSSGLYSLSSVVTVPSSSLGTQTYICNVNHKPSNTKVDKKVEPKSCDKTHTCPPCPAPEAAGAPSVFLFPPKPKDTLMISRTPEVTCVVVDVSHEDPEVKFNWYVDGVEVHNAKTKPREEQYNSTYRVVSVLTVLHQDWLNGKEYKCKVSNKALPAPIEKTISKAKGQPREPQVYTLPPSREEMTKNQVSLTCLVKGFYPSDIAVEWESNGQPENNYKTTPPVLDSDGSFFLYSKLTVDKSRWQQGNVFSCSVMHEALHNHYTQKSLSLSPGGGGGSAPTSSSTKKTQLQLEHLLLDLQMILNGINNYKNPKLTRMLTFKFYMPKKATELKHLQCLEEELKPLEEALNLAPSKNFHLRPRDLISDINVIVLELKGSETTFMCEYADETATIVEFINRWITFSQSIISTLT

SEQ ID NO: 621 - protein, 215 aa, Artificial Sequence
  Description of Artificial Sequence: Synthetic polypeptide
DIQMTQSPSSLSASVGDRVTITCRASQIIGTNLAWYQQKPGKAPKLLIYGASSLQSGVPSRFSGSGSGTDFTLTISSLQPEDFATYYCQQSYRLPFTFGQGTKVEIKRRTVAAPSVFIFPPSDEQLKSGTASVVCLLNNFYPREAKVQWKVDNALQSGNSQESVTEQDSKDSTYSLSSTLTLSKADYEKHKVYACEVTHQGLSSPVTKSFNRGEC

SEQ ID NO: 622 - protein, 586 aa, Artificial Sequence
  Description of Artificial Sequence: Synthetic polypeptide
EVQLLESGGGLVQPGGSLRLSCAASGFTFSDFWMHWVRQAPGKGLEWISYISGDSGYTNYADSVKGRFTISRDNSKNTLYLQMNSLRAEDTAVYYCARDRPYYYYMDVWGKGTTVTVSSASTKGPSVFPLAPSSKSTSGGTAALGCLVKDYFPEPVTVSWNSGALTSGVHTFPAVLQSSGLYSLSSVVTVPSSSLGTQTYICNVNHKPSNTKVDKKVEPKSCDKTHTCPPCPAPEAAGAPSVFLFPPKPKDTLMISRTPEVTCVVVDVSHEDPEVKFNWYVDGVEVHNAKTKPREEQYNSTYRVVSVLTVLHQDWLNGKEYKCKVSNKALPAPIEKTISKAKGQPREPQVYTLPPSREEMTKNQVSLTCLVKGFYPSDIAVEWESNGQPENNYKTTPPVLDSDGSFFLYSKLTVDKSRWQQGNVFSCSVMHEALHNHYTQKSLSLSPGGGGGSAPTSSSTKKTQLQLEHLLLDLQMILNGINNYKNPKLTRMLTFKFYMPKKATELKHLQCLEEELKPLEEALNLAPSKNFHLRPRDLISDINVIVLELKGSETTFMCEYADETATIVEFINRWITFSQSIISTLT

SEQ ID NO: 623 - protein, 214 aa, Artificial Sequence
  Description of Artificial Sequence: Synthetic polypeptide
DIQMTQSPSSLSASVGDRVTITCRASQSVSRSLAWYQQKPGKAPKLLIYAASSLQSGVPSRFSGSGSGTDFTLTISSLQPEDFATYYCQQYKSYPVTFGQGTKVEIKRTVAAPSVFIFPPSDEQLKSGTASVVCLLNNFYPREAKVQWKVDNALQSGNSQESVTEQDSKDSTYSLSSTLTLSKADYEKHKVYACEVTHQGLSSPVTKSFNRGEC

SEQ ID NO: 624 - protein, 587 aa, Artificial Sequence
  Description of Artificial Sequence: Synthetic polypeptide
EVQLLESGGGLVKPGGSLRLSCAASGFTFDDYAMHWVRQAPGKGLEWVASITSSSAFIDYAASVKGRFTISRDDSKNTLYLQMNSLKTEDTAVYYCARERVDWNSYFDLWGRGTLVTVSSASTKGPSVFPLAPSSKSTSGGTAALGCLVKDYFPEPVTVSWNSGALTSGVHTFPAVLQSSGLYSLSSVVTVPSSSLGTQTYICNVNHKPSNTKVDKKVEPKSCDKTHTCPPCPAPEAAGAPSVFLFPPKPKDTLMISRTPEVTCVVVDVSHEDPEVKFNWYVDGVEVHNAKTKPREEQYNSTYRVVSVLTVLHQDWLNGKEYKCKVSNKALPAPIEKTISKAKGQPREPQVYTLPPSREEMTKNQVSLTCLVKGFYPSDIAVEWESNGQPENNYKTTPPVLDSDGSFFLYSKLTVDKSRWQQGNVFSCSVMHEALHNHYTQKSLSLSPGGGGGSAPTSSSTKKTQLQLEHLLLDLQMILNGINNYKNPKLTRMLTFKFYMPKKATELKHLQCLEEELKPLEEALNLAPSKNFHLRPRDLISDINVIVLELKGSETTFMCEYADETATIVEFINRWITFSQSIISTLT

SEQ ID NO: 625 - protein, 215 aa, Artificial Sequence
  Description of Artificial Sequence: Synthetic polypeptide
EIVMTQSPATLSVSPGERATLSCRASQGISNSYLAWYQQKPGQAPRLLIYGASTRATGIPARFSGSGSGTEFTLTISSLQSEDFAVYYCQQYYTYPPTFGPGTKVDIKRTVAAPSVFIFPPSDEQLKSGTASVVCLLNNFYPREAKVQWKVDNALQSGNSQESVTEQDSKDSTYSLSSTLTLSKADYEKHKVYACEVTHQGLSSPVTKSFNRGEC

SEQ ID NO: 626-627 - skipped (2 entries)

SEQ ID NO: 628 - protein, 9 aa, Artificial Sequence
  Description of Artificial Sequence: Synthetic peptide
YSFTTYYMH

SEQ ID NO: 629 - protein, 14 aa, Artificial Sequence
  Description of Artificial Sequence: Synthetic peptide
VSRINSYGTSTTYA

SEQ ID NO: 630 - protein, 9 aa, Artificial Sequence
  Description of Artificial Sequence: Synthetic peptide
IYGASSLQS

SEQ ID NO: 631 - protein, 8 aa, Artificial Sequence
  Description of Artificial Sequence: Synthetic peptide
YGASSLQS

SEQ ID NO: 632 - protein, 9 aa, Artificial Sequence
  Description of Artificial Sequence: Synthetic peptide
QQSYRLPFT

SEQ ID NO: 633 - protein, 5 aa, Artificial Sequence
  Description of Artificial Sequence: Synthetic peptide
NYAFH

SEQ ID NO: 634 - protein, 17 aa, Artificial Sequence
  Description of Artificial Sequence: Synthetic peptide
RINSYGTSTTYADSVKG

SEQ ID NO: 635 - protein, 12 aa, Artificial Sequence
  Description of Artificial Sequence: Synthetic peptide
EGPVAGYWYFDL

SEQ ID NO: 636 - protein, 6 aa, Artificial Sequence
  Description of Artificial Sequence: Synthetic peptide
QIIGTN

SEQ ID NO: 637 - protein, 8 aa, Artificial Sequence
  Description of Artificial Sequence: Synthetic peptide
GFTFNNYA

SEQ ID NO: 638 - protein, 8 aa, Artificial Sequence
  Description of Artificial Sequence: Synthetic peptide
INSYGTST

SEQ ID NO: 639 - protein, 14 aa, Artificial Sequence
  Description of Artificial Sequence: Synthetic peptide
AREGPVAGYWYFDL

SEQ ID NO: 640 - protein, 7 aa, Artificial Sequence
  Description of Artificial Sequence: Synthetic peptide
GFTFNNY

SEQ ID NO: 641 - protein, 6 aa, Artificial Sequence
  Description of Artificial Sequence: Synthetic peptide
NSYGTS

SEQ ID NO: 642 - protein, 11 aa, Artificial Sequence [sequence omitted]

SEQ ID NO: 643 - protein, 5 aa, Artificial Sequence
  Description of Artificial Sequence: Synthetic peptide
DFWMH

SEQ ID NO: 644 - protein, 17 aa, Artificial Sequence
  Description of Artificial Sequence: Synthetic peptide
YISGDSGYTNYADSVKG

SEQ ID NO: 645 - protein, 10 aa, Artificial Sequence
  Description of Artificial Sequence: Synthetic peptide
DRPYYYYMDV

SEQ ID NO: 646 - protein, 6 aa, Artificial Sequence
  Description of Artificial Sequence: Synthetic peptide
QSVSRS

SEQ ID NO: 647 - protein, 8 aa, Artificial Sequence
  Description of Artificial Sequence: Synthetic peptide
GFTFSDFW

SEQ ID NO: 648 - protein, 8 aa, Artificial Sequence
  Description of Artificial Sequence: Synthetic peptide
ISGDSGYT

SEQ ID NO: 649 - protein, 12 aa, Artificial Sequence
  Description of Artificial Sequence: Synthetic peptide
ARDRPYYYYMDV

SEQ ID NO: 650 - protein, 7 aa, Artificial Sequence
  Description of Artificial Sequence: Synthetic peptide
GFTFSDF

SEQ ID NO: 651 - protein, 6 aa, Artificial Sequence
  Description of Artificial Sequence: Synthetic peptide
SGDSGY

SEQ ID NO: 652 - protein, 11 aa, Artificial Sequence [sequence omitted]

SEQ ID NO: 653 - protein, 5 aa, Artificial Sequence
  Description of Artificial Sequence: Synthetic peptide
DYAMH

SEQ ID NO: 654 - protein, 17 aa, Artificial Sequence
  Description of Artificial Sequence: Synthetic peptide
SITSSSAFIDYAASVKG

SEQ ID NO: 655 - protein, 11 aa, Artificial Sequence
  Description of Artificial Sequence: Synthetic peptide
ERVDWNSYFDL

SEQ ID NO: 656 - protein, 7 aa, Artificial Sequence
  Description of Artificial Sequence: Synthetic peptide
QGISNSY

SEQ ID NO: 657 - protein, 8 aa, Artificial Sequence
  Description of Artificial Sequence: Synthetic peptide
GFTFDDYA

SEQ ID NO: 658 - protein, 8 aa, Artificial Sequence
  Description of Artificial Sequence: Synthetic peptide
ITSSSAFI

SEQ ID NO: 659 - protein, 13 aa, Artificial Sequence
  Description of Artificial Sequence: Synthetic peptide
ARERVDWNSYFDL

SEQ ID NO: 660 - protein, 7 aa, Artificial Sequence
  Description of Artificial Sequence: Synthetic peptide
GFTFDDY

SEQ ID NO: 661 - protein, 6 aa, Artificial Sequence
  Description of Artificial Sequence: Synthetic peptide
TSSSAF

SEQ ID NO: 662-765 - skipped (104 entries)

SEQ ID NO: 766 - protein, 9 aa, Artificial Sequence
  Description of Artificial Sequence: Synthetic peptide
YSFTSYYMH

SEQ ID NO: 767-976 - skipped (210 entries)

SEQ ID NO: 977 - protein, 14 aa, Artificial Sequence
  Description of Artificial Sequence: Synthetic peptide
MGIINPSGGSTSYA

SEQ ID NO: 978-1213 - skipped (236 entries)

SEQ ID NO: 1214 - protein, 11 aa, Artificial Sequence
  Description of Artificial Sequence: Synthetic peptide
RASQSISSYLA

SEQ ID NO: 1215-1345 - skipped (131 entries)

SEQ ID NO: 1346 - protein, 119 aa, Artificial Sequence
  Description of Artificial Sequence: Synthetic polypeptide
EVQLLESGGGLVQPGGSLRLSCAASGFTFSDFWMHWVRQAPGKGLEWISYISGDSGYTNYADSVKGRFTISRDNSKNTLYLQMNSLRAEDTAVYYCARDRPNYYYMDVWGKGTTVTVSS

SEQ ID NO: 1347 - protein, 119 aa, Artificial Sequence
  Description of Artificial Sequence: Synthetic polypeptide
EVQLLESGGGLVQPGGSLRLSCAASGFTFSSYWMHWVRQAPGKGLEWVSAISGSSGSTYYADSVKGRFTISRDNSKNTLYLQMNSLRAEDTAVYYCARDRPYGYYMDVWGKGTTVTVSS

SEQ ID NO: 1348 - protein, 119 aa, Artificial Sequence
  Description of Artificial Sequence: Synthetic polypeptide
EVQLLESGGGLVQPGGSLRLSCAASGFTFSDFWMHWVRQAPGKGLEWISYISGDSGYTNYADSVKGRFTISRDNSKNTLYLQMNSLRAEDTAVYYCARDRPQYYYMDVWGKGTTVTVSS

SEQ ID NO: 1349 - protein, 119 aa, Artificial Sequence
  Description of Artificial Sequence: Synthetic polypeptide
EVQLLESGGGLVQPGGSLRLSCAASGFTFSDFWMHWVRQAPGKGLEWISYISGDSGYTNYADSVKGRFTISRDNSKNTLYLQMNSLRAEDTAVYYCARDRPGYYYMDVWGKGTTVTVSS

SEQ ID NO: 1350 - protein, 119 aa, Artificial Sequence
  Description of Artificial Sequence: Synthetic polypeptide
EVQLLESGGGLVQPGGSLRLSCAASGFTFSDFWMHWVRQAPGKGLEWISYISGDSGYTNYADSVKGRFTISRDNSKNTLYLQMNSLRAEDTAVYYCARDRPYYYQMDVWGKGTTVTVSS

SEQ ID NO: 1351 - protein, 119 aa, Artificial Sequence
  Description of Artificial Sequence: Synthetic polypeptide
EVQLLESGGGLVQPGGSLRLSCAASGFTFSDFWMHWVRQAPGKGLEWISYISGDSGYTNYADSVKGRFTISRDNSKNTLYLQMNSLRAEDTAVYYCARDRPYYYGMDVWGKGTTVTVSS

SEQ ID NO: 1352 - protein, 119 aa, Artificial Sequence
  Description of Artificial Sequence: Synthetic polypeptide
EVQLLESGGGLVQPGGSLRLSCAASGFTFSNFWMHWVRQAPGKGLEWISYISGDSGYTNYADSVKGRFTISRDNSKNTLYLQMNSLRAEDTAVYYCARDRPYYYYMDVWGKGTTVTVSS

SEQ ID NO: 1353 - protein, 119 aa, Artificial Sequence
  Description of Artificial Sequence: Synthetic polypeptide
EVQLLESGGGLVQPGGSLRLSCAASGFTFSSFWMHWVRQAPGKGLEWISYISGDSGYTNYADSVKGRFTISRDNSKNTLYLQMNSLRAEDTAVYYCARDRPYYYYMDVWGKGTTVTVSS

SEQ ID NO: 1354 - protein, 119 aa, Artificial Sequence
  Description of Artificial Sequence: Synthetic polypeptide
EVQLLESGGGLVQPGGSLRLSCAASGFTFSAFWMHWVRQAPGKGLEWISYISGDSGYTNYADSVKGRFTISRDNSKNTLYLQMNSLRAEDTAVYYCARDRPYYYYMDVWGKGTTVTVSS

SEQ ID NO: 1355 - protein, 119 aa, Artificial Sequence
  Description of Artificial Sequence: Synthetic polypeptide
EVQLLESGGGLVQPGGSLRLSCAASGFTFSDFWMHWVRQAPGKGLEWISYISGDSGYTNYADSVKGRFTISRDNSNNTLYLQMNSLRAEDTAVYYCARDRPYYYYMDVWGKGTTVTVSS

SEQ ID NO: 1356 - protein, 119 aa, Artificial Sequence
  Description of Artificial Sequence: Synthetic polypeptide
EVQLLESGGGLVQPGGSLRLSCAASGFTFSSYAMSWVRQAPGKGLEWISYISGDSGYTNYADSVKGRFTISRDNSKNTLYLQMNSLRAEDTAVYYCARDRPYYYYMDVWGKGTTVTVSS

SEQ ID NO: 1357 - protein, 119 aa, Artificial Sequence
  Description of Artificial Sequence: Synthetic polypeptide
EVQLLESGGGLVQPGGSLRLSCAASGFTFSDFWMHWVRQAPGKGLEWVSAISGSGGSTYYADSVKGRFTISRDNSKNTLYLQMNSLRAEDTAVYYCARDRPYYYYMDVWGKGTTVTVSS

SEQ ID NO: 1358 - protein, 119 aa, Artificial Sequence
  Description of Artificial Sequence: Synthetic polypeptide
EVQLLESGGGLVQPGGSLRLSCAASGFTFSSYAMSWVRQAPGKGLEWVSAISGSGGSTYYADSVKGRFTISRDNSKNTLYLQMNSLRAEDTAVYYCARDRPYYYYMDVWGKGTTVTVSS

SEQ ID NO: 1359 - protein, 113 aa, Artificial Sequence
  Description of Artificial Sequence: Synthetic polypeptide
DIVMTQSPDSLAVSLGERATINCKSSQSVLYSPNNKNYLAWYQQKPGQPPKLLIYWASTRESGVPDRFSGSGSGTDFTLTISSLQAEDVAVYYCQQYYTTPPTFGQGTRLEIK

SEQ ID NO: 1360 - protein, 107 aa, Artificial Sequence
  Description of Artificial Sequence: Synthetic polypeptide
DIQMTQSPSSLSASVGDRVTITCRASQSISSYLNWYQQKPGKAPKLLIYAASSLQSGVPSRFSGSGSGTDFTLTISSLQPEDFATYYCQQSYSTPRTFGQGTKVEIK

SEQ ID NO: 1361 - protein, 107 aa, Artificial Sequence
  Description of Artificial Sequence: Synthetic polypeptide
DIQMTQSPSSLSASVGDRVTITCRASQSISSYLNWYQQKPGKAPKLLIYAASSLQSGVPSRFSGSGSGTDFTLTISSLQPEDFATYYCQQYKSYPVTFGQGTKVEIK

SEQ ID NO: 1362 - protein, 107 aa, Artificial Sequence
  Description of Artificial Sequence: Synthetic polypeptide
DIQMTQSPSSLSASVGDRVTITCRASQSVSRSLAWYQQKPGKAPKLLIYAASSLQSGVPSRFSGSGSGTDFTLTISSLQPEDFATYYCQQSYSTPRTFGQGTKVEIK

SEQ ID NO: 1363 - protein, 107 aa, Artificial Sequence
  Description of Artificial Sequence: Synthetic polypeptide
DIQMTQSPSSLSASVGDRVTITCRASQSISRSLAWYQQKPGKAPKLLIYAASSLQSGVPSRFSGSGSGTDFTLTISSLQPEDFATYYCQQYKSYPVTFGQGTKVEIK

SEQ ID NO: 1364 - protein, 107 aa, Artificial Sequence
  Description of Artificial Sequence: Synthetic polypeptide
DIQMTQSPSSLSASVGDRVTITCRASQSVSSSLAWYQQKPGKAPKLLIYAASSLQSGVPSRFSGSGSGTDFTLTISSLQPEDFATYYCQQYKSYPVTFGQGTKVEIK

SEQ ID NO: 1365 - protein, 107 aa, Artificial Sequence
  Description of Artificial Sequence: Synthetic polypeptide
DIQMTQSPSSLSASVGDRVTITCRASQSVSRYLAWYQQKPGKAPKLLIYAASSLQSGVPSRFSGSGSGTDFTLTISSLQPEDFATYYCQQYKSYPVTFGQGTKVEIK

SEQ ID NO: 1366 - protein, 107 aa, Artificial Sequence
  Description of Artificial Sequence: Synthetic polypeptide
DIQMTQSPSSLSASVGDRVTITCRASQSVSRSLNWYQQKPGKAPKLLIYAASSLQSGVPSRFSGSGSGTDFTLTISSLQPEDFATYYCQQYKSYPVTFGQGTKVEIK

SEQ ID NO: 1367 - protein, 107 aa, Artificial Sequence
  Description of Artificial Sequence: Synthetic polypeptide
DIQMTQSPSSLSASVGDRVTITCRASQSISSSLAWYQQKPGKAPKLLIYAASSLQSGVPSRFSGSGSGTDFTLTISSLQPEDFATYYCQQYKSYPVTFGQGTKVEIK

SEQ ID NO: 1368 - protein, 107 aa, Artificial Sequence
  Description of Artificial Sequence: Synthetic polypeptide
DIQMTQSPSSLSASVGDRVTITCRASQSISRYLAWYQQKPGKAPKLLIYAASSLQSGVPSRFSGSGSGTDFTLTISSLQPEDFATYYCQQYKSYPVTFGQGTKVEIK

SEQ ID NO: 1369 - protein, 107 aa, Artificial Sequence
  Description of Artificial Sequence: Synthetic polypeptide
DIQMTQSPSSLSASVGDRVTITCRASQSISRSLNWYQQKPGKAPKLLIYAASSLQSGVPSRFSGSGSGTDFTLTISSLQPEDFATYYCQQYKSYPVTFGQGTKVEIK

SEQ ID NO: 1370 - protein, 107 aa, Artificial Sequence
  Description of Artificial Sequence: Synthetic polypeptide
DIQMTQSPSSLSASVGDRVTITCRASQSVSSYLAWYQQKPGKAPKLLIYAASSLQSGVPSRFSGSGSGTDFTLTISSLQPEDFATYYCQQYKSYPVTFGQGTKVEIK

SEQ ID NO: 1371 - protein, 107 aa, Artificial Sequence
  Description of Artificial Sequence: Synthetic polypeptide
DIQMTQSPSSLSASVGDRVTITCRASQSVSSSLNWYQQKPGKAPKLLIYAASSLQSGVPSRFSGSGSGTDFTLTISSLQPEDFATYYCQQYKSYPVTFGQGTKVEIK

SEQ ID NO: 1372 - protein, 107 aa, Artificial Sequence
  Description of Artificial Sequence: Synthetic polypeptide
DIQMTQSPSSLSASVGDRVTITCRASQSVSRYLNWYQQKPGKAPKLLIYAASSLQSGVPSRFSGSGSGTDFTLTISSLQPEDFATYYCQQYKSYPVTFGQGTKVEIK

SEQ ID NO: 1373 - protein, 107 aa, Artificial Sequence
  Description of Artificial Sequence: Synthetic polypeptide
DIQMTQSPSSLSASVGDRVTITCRASQSISSSLNWYQQKPGKAPKLLIYAASSLQSGVPSRFSGSGSGTDFTLTISSLQPEDFATYYCQQYKSYPVTFGQGTKVEIK

SEQ ID NO: 1374 - protein, 107 aa, Artificial Sequence
  Description of Artificial Sequence: Synthetic polypeptide
DIQMTQSPSSLSASVGDRVTITCRASQSISRYLNWYQQKPGKAPKLLIYAASSLQSGVPSRFSGSGSGTDFTLTISSLQPEDFATYYCQQYKSYPVTFGQGTKVEIK

SEQ ID NO: 1375 - protein, 107 aa, Artificial Sequence
  Description of Artificial Sequence: Synthetic polypeptide
DIQMTQSPSSLSASVGDRVTITCRASQSISSYLAWYQQKPGKAPKLLIYAASSLQSGVPSRFSGSGSGTDFTLTISSLQPEDFATYYCQQYKSYPVTFGQGTKVEIK

SEQ ID NO: 1376 - protein, 107 aa, Artificial Sequence
  Description of Artificial Sequence: Synthetic polypeptide
DIQMTQSPSSLSASVGDRVTITCRASQSVSSYLNWYQQKPGKAPKLLIYAASSLQSGVPSRFSGSGSGTDFTLTISSLQPEDFATYYCQQYKSYPVTFGQGTKVEIK

SEQ ID NO: 1377 - protein, 119 aa, Artificial Sequence
  Description of Artificial Sequence: Synthetic polypeptide
EVQLLESGGGLVQPGGSLRLSCAASGFTFSDFWMHWVRQAPGKGLEWISYISGESGYTNYADSVKGRFTISRDNSKNTLYLQMNSLRAEDTAVYYCARDRPYYYYMDVWGKGTTVTVSS

SEQ ID NO: 1378 - protein, 119 aa, Artificial Sequence
  Description of Artificial Sequence: Synthetic polypeptide
EVQLLESGGGLVQPGGSLRLSCAASGFTFSDFWMHWVRQAPGKGLEWISYISGDSGYTQYADSVKGRFTISRDNSKNTLYLQMNSLRAEDTAVYYCARDRPYYYYMDVWGKGTTVTVSS

SEQ ID NO: 1379 - protein, 119 aa, Artificial Sequence
  Description of Artificial Sequence: Synthetic polypeptide
EVQLLESGGGLVQPGGSLRLSCAASGFTFSDFWMHWVRQAPGKGLEWISYISGDSGYTNYADSVKGRFTISRDQSKNTLYLQMNSLRAEDTAVYYCARDRPYYYYMDVWGKGTTVTVSS

SEQ ID NO: 1380 - protein, 107 aa, Artificial Sequence
  Description of Artificial Sequence: Synthetic polypeptide
DIQMTQSPSSLSASVGDRVTITCRASQSVSRSLGWYQQKPGKAPKLLIYAASSLQSGVPSRFSGSGSGTDFTLTISSLQPEDFATYYCQQYKSYPVTFGQGTKVEIK

SEQ ID NO: 1381 - protein, 107 aa, Artificial Sequence
  Description of Artificial Sequence: Synthetic polypeptide
DIQMTQSPSSLSASVGDRVTITCRASQSVSRSLDWYQQKPGKAPKLLIYAASSLQSGVPSRFSGSGSGTDFTLTISSLQPEDFATYYCQQYKSYPVTFGQGTKVEIK

SEQ ID NO: 1382 - protein, 107 aa, Artificial Sequence
  Description of Artificial Sequence: Synthetic polypeptide
DIQMTQSPSSLSASVGDRVTITCRASQSVSRSLTWYQQKPGKAPKLLIYAASSLQSGVPSRFSGSGSGTDFTLTISSLQPEDFATYYCQQYKSYPVTFGQGTKVEIK

SEQ ID NO: 1383 - protein, 107 aa, Artificial Sequence
  Description of Artificial Sequence: Synthetic polypeptide
DIQMTQSPSSLSASVGDRVTITCRASQSVSRSLSWYQQKPGKAPKLLIYAASSLQSGVPSRFSGSGSGTDFTLTISSLQPEDFATYYCQQYKSYPVTFGQGTKVEIK

SEQ ID NO: 1384 - protein, 107 aa, Artificial Sequence
  Description of Artificial Sequence: Synthetic polypeptide
DIQMTQSPSSLSASVGDRVTITCRASQSVSRSLEWYQQKPGKAPKLLIYAASSLQSGVPSRFSGSGSGTDFTLTISSLQPEDFATYYCQQYKSYPVTFGQGTKVEIK

SEQ ID NO: 1385 - protein, 107 aa, Artificial Sequence
  Description of Artificial Sequence: Synthetic polypeptide
DIQMTQSPSSLSASVGDRVTITCRASQSVSRSLKWYQQKPGKAPKLLIYAASSLQSGVPSRFSGSGSGTDFTLTISSLQPEDFATYYCQQYKSYPVTFGQGTKVEIK

SEQ ID NO: 1386 - protein, 107 aa, Artificial Sequence
  Description of Artificial Sequence: Synthetic polypeptide
DIQMTQSPSSLSASVGDRVTITCRASQSVSRSLLWYQQKPGKAPKLLIYAASSLQSGVPSRFSGSGSGTDFTLTISSLQPEDFATYYCQQYKSYPVTFGQGTKVEIK

SEQ ID NO: 1387 - protein, 119 aa, Artificial Sequence
  Description of Artificial Sequence: Synthetic polypeptide
EVQLLESGGGLVQPGGSLRLSCAASGFTFSDFWMHWVRQAPGKGLEWISYISGDSGYTNYADSVKGRFTISRDNSKNTLYLQMNSLRAEDTAVYYCARDRPYYYIMDVWGKGTTVTVSS

SEQ ID NO: 1388 - protein, 119 aa, Artificial Sequence
  Description of Artificial Sequence: Synthetic polypeptide
EVQLLESGGGLVQPGGSLRLSCAASGFTFSDFWMHWVRQAPGKGLEWISYISGDSGYTNYADSVKGRFTISRDNSKNTLYLQMNSLRAEDTAVYYCARDRPYYYWMDVWGKGTTVTVSS

SEQ ID NO: 1389 - protein, 119 aa, Artificial Sequence
  Description of Artificial Sequence: Synthetic polypeptide
EVQLLESGGGLVQPGGSLRLSCAASGFTFSDFWMHWVRQAPGKGLEWISYISGDSGYTNYADSVKGRFTISRDNSKNTLYLQMNSLRAEDTAVYYCARDRPSYYYMDVWGKGTTVTVSS

SEQ ID NO: 1390 - protein, 119 aa, Artificial Sequence
  Description of Artificial Sequence: Synthetic polypeptide
EVQLLESGGGLVQPGGSLRLSCAASGFTFSDFWMHWVRQAPGKGLEWISYISGDSGYTNYADSVKGRFTISRDNSKNTLYLQMNSLRAEDTAVYYCARDRPTYYYMDVWGKGTTVTVSS

SEQ ID NO: 1391 - protein, 119 aa, Artificial Sequence
  Description of Artificial Sequence: Synthetic polypeptide
EVQLLESGGGLVQPGGSLRLSCAASGFTFSDYWMHWVRQAPGKGLEWISYISGDSGYTNYADSVKGRFTISRDNSKNTLYLQMNSLRAEDTAVYYCARDRPYYYYMDVWGKGTTVTVSS

SEQ ID NO: 1392 - protein, 119 aa, Artificial Sequence
  Description of Artificial Sequence: Synthetic polypeptide
EVQLLESGGGLVQPGGSLRLSCAASGFTFSSYWMHWVRQAPGKGLEWISYISGDSGYTNYADSVKGRFTISRDNSKNTLYLQMNSLRAEDTAVYYCARDRPYYYYMDVWGKGTTVTVSS

SEQ ID NO: 1393 - protein, 119 aa, Artificial Sequence
  Description of Artificial Sequence: Synthetic polypeptide
EVQLLESGGGLVQPGGSLRLSCAASGFTFSDFWMHWVRQAPGKGLEWISAISGSSGSTYYADSVKGRFTISRDNSKNTLYLQMNSLRAEDTAVYYCARDRPYYYYMDVWGKGTTVTVSS

SEQ ID NO: 1394 - protein, 119 aa, Artificial Sequence
  Description of Artificial Sequence: Synthetic polypeptide
EVQLLESGGGLVQPGGSLRLSCAASGFTFSSYWMHWVRQAPGKGLEWISAISGSSGSTYYADSVKGRFTISRDNSKNTLYLQMNSLRAEDTAVYYCARDRPYYYYMDVWGKGTTVTVSS

SEQ ID NO: 1395 - protein, 119 aa, Artificial Sequence
  Description of Artificial Sequence: Synthetic polypeptide
EVQLLESGGGLVQPGGSLRLSCAASGFTFSSYWMHWVRQAPGKGLEWVSAISGSGGSTYYADSVKGRFTISRDNSKNTLYLQMNSLRAEDTAVYYCARDRPYYYYMDVWGKGTTVTVSS

SEQ ID NO: 1396 - protein, 119 aa, Artificial Sequence
  Description of Artificial Sequence: Synthetic polypeptide
EVQLLESGGGLVQPGGSLRLSCAASGFTFSSYWMHWVRQAPGKGLEWISYISGDSGYTNYADSVKGRFTISRDNSKNTLYLQMNSLRAEDTAVYYCARDRPYYYIMDVWGKGTTVTVSS

SEQ ID NO: 1397 - protein, 119 aa, Artificial Sequence
  Description of Artificial Sequence: Synthetic polypeptide
EVQLLESGGGLVQPGGSLRLSCAASGFTFSDFWMHWVRQAPGKGLEWVSAISGSGGSTYYADSVKGRFTISRDNSKNTLYLQMNSLRAEDTAVYYCARDRPYYYIMDVWGKGTTVTVSS

SEQ ID NO: 1398 - protein, 119 aa, Artificial Sequence
  Description of Artificial Sequence: Synthetic polypeptide
EVQLLESGGGLVQPGGSLRLSCAASGFTFSSYWMHWVRQAPGKGLEWVSAISGSGGSTYYADSVKGRFTISRDNSKNTLYLQMNSLRAEDTAVYYCARDRPYYYIMDVWGKGTTVTVSS

SEQ ID NO: 1399 - protein, 14 aa, Artificial Sequence
  Description of Artificial Sequence: Synthetic peptide
CARDRPNYYYMDVW

SEQ ID NO: 1400 - protein, 14 aa, Artificial Sequence
  Description of Artificial Sequence: Synthetic peptide
CARDRPQYYYMDVW

SEQ ID NO: 1401 - protein, 14 aa, Artificial Sequence
  Description of Artificial Sequence: Synthetic peptide
CARDRPGYYYMDVW

SEQ ID NO: 1402 - protein, 14 aa, Artificial Sequence
  Description of Artificial Sequence: Synthetic peptide
CARDRPYYYQMDVW

SEQ ID NO: 1403 - protein, 14 aa, Artificial Sequence [sequence omitted]

SEQ ID NO: 1404 - protein, 9 aa, Artificial Sequence
  Description of Artificial Sequence: Synthetic peptide
FTFSNFWMH

SEQ ID NO: 1405 - protein, 9 aa, Artificial Sequence
  Description of Artificial Sequence: Synthetic peptide
FTFSSFWMH

SEQ ID NO: 1406 - protein, 9 aa, Artificial Sequence
  Description of Artificial Sequence: Synthetic peptide
FTFSAFWMH

SEQ ID NO: 1407 - protein, 9 aa, Artificial Sequence
  Description of Artificial Sequence: Synthetic peptide
QQSYSTPRT

SEQ ID NO: 1408 - protein, 11 aa, Artificial Sequence
  Description of Artificial Sequence: Synthetic peptide
RASQSISRSLA

SEQ ID NO: 1409 - protein, 11 aa, Artificial Sequence
  Description of Artificial Sequence: Synthetic peptide
RASQSVSSSLA

SEQ ID NO: 1410 - protein, 11 aa, Artificial Sequence
  Description of Artificial Sequence: Synthetic peptide
RASQSVSRYLA

SEQ ID NO: 1411 - protein, 11 aa, Artificial Sequence
  Description of Artificial Sequence: Synthetic peptide
RASQSVSRSLN

SEQ ID NO: 1412 - protein, 11 aa, Artificial Sequence
  Description of Artificial Sequence: Synthetic peptide
RASQSISSSLA

SEQ ID NO: 1413 - protein, 11 aa, Artificial Sequence
  Description of Artificial Sequence: Synthetic peptide
RASQSISRYLA

SEQ ID NO: 1414 - protein, 11 aa, Artificial Sequence
  Description of Artificial Sequence: Synthetic peptide
RASQSISRSLN

SEQ ID NO: 1415 - protein, 11 aa, Artificial Sequence
  Description of Artificial Sequence: Synthetic peptide
RASQSVSSYLA

SEQ ID NO: 1416 - protein, 11 aa, Artificial Sequence
  Description of Artificial Sequence: Synthetic peptide
RASQSVSSSLN

SEQ ID NO: 1417 - protein, 11 aa, Artificial Sequence
  Description of Artificial Sequence: Synthetic peptide
RASQSVSRYLN

SEQ ID NO: 1418 - protein, 11 aa, Artificial Sequence
  Description of Artificial Sequence: Synthetic peptide
RASQSISSSLN

SEQ ID NO: 1419 - protein, 11 aa, Artificial Sequence
  Description of Artificial Sequence: Synthetic peptide
RASQSISRYLN

SEQ ID NO: 1420 - protein, 11 aa, Artificial Sequence
  Description of Artificial Sequence: Synthetic peptide
RASQSISSYLA

SEQ ID NO: 1421 - protein, 11 aa, Artificial Sequence
  Description of Artificial Sequence: Synthetic peptide
RASQSVSSYLN

SEQ ID NO: 1422 - protein, 13 aa, Artificial Sequence
  Description of Artificial Sequence: Synthetic peptide
SYISGESGYTNYA

SEQ ID NO: 1423 - protein, 13 aa, Artificial Sequence
  Description of Artificial Sequence: Synthetic peptide
SYISGDSGYTQYA

SEQ ID NO: 1424 - protein, 11 aa, Artificial Sequence
  Description of Artificial Sequence: Synthetic peptide
RASQSVSRSLG

SEQ ID NO: 1425 - protein, 11 aa, Artificial Sequence
  Description of Artificial Sequence: Synthetic peptide
RASQSVSRSLD

SEQ ID NO: 1426 - protein, 11 aa, Artificial Sequence
  Description of Artificial Sequence: Synthetic peptide
RASQSVSRSLT

SEQ ID NO: 1427 - protein, 11 aa, Artificial Sequence
  Description of Artificial Sequence: Synthetic peptide
RASQSVSRSLS

SEQ ID NO: 1428 - protein, 11 aa, Artificial Sequence
  Description of Artificial Sequence: Synthetic peptide
RASQSVSRSLE

SEQ ID NO: 1429 - protein, 11 aa, Artificial Sequence
  Description of Artificial Sequence: Synthetic peptide
RASQSVSRSLK

SEQ ID NO: 1430 - protein, 11 aa, Artificial Sequence
  Description of Artificial Sequence: Synthetic peptide
RASQSVSRSLL

SEQ ID NO: 1431 - protein, 14 aa, Artificial Sequence
  Description of Artificial Sequence: Synthetic peptide
CARDRPYYYIMDVW

SEQ ID NO: 1432 - protein, 14 aa, Artificial Sequence
  Description of Artificial Sequence: Synthetic peptide
CARDRPYYYWMDVW

SEQ ID NO: 1433 - protein, 14 aa, Artificial Sequence
  Description of Artificial Sequence: Synthetic peptide
CARDRPSYYYMDVW

SEQ ID NO: 1434 - protein, 14 aa, Artificial Sequence
  Description of Artificial Sequence: Synthetic peptide
CARDRPTYYYMDVW

SEQ ID NO: 1435 - protein, 9 aa, Artificial Sequence
  Description of Artificial Sequence: Synthetic peptide
FTFSDYWMH

SEQ ID NO: 1436 - protein, 13 aa, Artificial Sequence
  Description of Artificial Sequence: Synthetic peptide
SAISGSSGSTYYA

SEQ ID NO: 1437 - skipped

SEQ ID NO: 1438 - protein, 119 aa, Artificial Sequence
  Description of Artificial Sequence: Synthetic polypeptide
EVQLLESGGGLVQPGGSLRLSCAASGFTFSNSDMSWVRQAPGKGLEWVSGITISGGSTYYADSVKGRFTISRDNSKNTLYLQMNSLRAEDTAVYYCARGRGGSGWLDYWGQGTLVTVSS

SEQ ID NO: 1439 - protein, 119 aa, Artificial Sequence
  Description of Artificial Sequence: Synthetic polypeptide
EVQLLESGGGLVQPGGSLRLSCAASGFTFSSYWMHWVRQAPGKGLEWVSAISGSSGSTYYADSVKGRFTISRDNSKNTLYLQMNSLRAEDTAVYYCARDRPYYYYMDVWGKGTTVTVSS

SEQ ID NO: 1440 - protein, 119 aa, Artificial Sequence
  Description of Artificial Sequence: Synthetic polypeptide
EVQLLESGGGLVQPGGSLRLSCAASGFTFSSYWMHWVRQAPGKGLEWISAISGSGGSTYYADSVKGRFTISRDNSKNTLYLQMNSLRAEDTAVYYCARDRPYGYYMDVWGKGTTVTVSS

SEQ ID NO: 1441 - protein, 119 aa, Artificial Sequence
  Description of Artificial Sequence: Synthetic polypeptide
EVQLLESGGGLVQPGGSLRLSCAASGFTFSSYWMHWVRQAPGKGLEWISAISGSGGSTYYADSVKGRFTISRDNSKNTLYLQMNSLRAEDTAVYYCARDRPYYYYMDVWGKGTTVTVSS

SEQ ID NO: 1442 - protein, 119 aa, Artificial Sequence
  Description of Artificial Sequence: Synthetic polypeptide
EVQLLESGGGLVQPGGSLRLSCAASGFTFSSYWMHWVRQAPGKGLEWVSAISGSGGSTYYADSVKGRFTISRDNSKNTLYLQMNSLRAEDTAVYYCARDRPYGYYMDVWGKGTTVTVSS

SEQ ID NO: 1443 - protein, 119 aa, Artificial Sequence
  Description of Artificial Sequence: Synthetic polypeptide
EVQLLESGGGLVQPGGSLRLSCAASGFTFSSYWMHWVRQAPGKGLEWVSYISGSGGYTNYADSVKGRFTISRDNSKNTLYLQMNSLRAEDTAVYYCARDRPYGYYMDVWGKGTTVTVSS

SEQ ID NO: 1444 - protein, 119 aa, Artificial Sequence
  Description of Artificial Sequence: Synthetic polypeptide
EVQLLESGGGLVQPGGSLRLSCAASGFTFSSYWMHWVRQAPGKGLEWVSAISGSGGSTYYADSVKGRFTISRDNSKNTLYLQMNSLRAEDTAVYYCARDRPYYYDMDVWGKGTTVTVSS

SEQ ID NO: 1445 - protein, 119 aa, Artificial Sequence
  Description of Artificial Sequence: Synthetic polypeptide
EVQLLESGGGLVQPGGSLRLSCAASGFTFSSYWMHWVRQAPGKGLEWVSYISGSGGYTNYADSVKGRFTISRDNSKNTLYLQMNSLRAEDTAVYYCARDRPYYYDMDVWGKGTTVTVSS

SEQ ID NO: 1446 - protein, 119 aa, Artificial Sequence
  Description of Artificial Sequence: Synthetic polypeptide
EVQLLESGGGLVQPGGSLRLSCAASGFTFSSYDMSWVRQAPGKGLEWVSGITISGGSTYYADSVKGRFTISRDNSKNTLYLQMNSLRAEDTAVYYCARGRGGSGWLDYWGQGTLVTVSS

SEQ ID NO: 1447 - protein, 119 aa, Artificial Sequence
  Description of Artificial Sequence: Synthetic polypeptide
EVQLLESGGGLVQPGGSLRLSCAASGFTFSSYDMSWVRQAPGKGLEWVSGITISGGSTYYADSVKGRFTISRDNSKNTLYLQMNSLRAEDTAVYYCARGRGGSGWLDYWGQGTDVTVSS

SEQ ID NO: 1448 - protein, 113 aa, Artificial Sequence
  Description of Artificial Sequence: Synthetic polypeptide
QVQLVQSGAEVKKPGASVKVSCKASGYSFTTYYMHWVRQAPGQGLEWMGIIAPSGGSTSYAQKFQGRVTMTRDTSTSTVYMELSSLRSEDTAVYYCASGWVYWGQGTLVTVSS

SEQ ID NO: 1449 - protein, 107 aa, Artificial Sequence
  Description of Artificial Sequence: Synthetic polypeptide
DIQMTQSPSSLSASVGDRVTITCQASRDIKNYLAWYQQKPGKAPKLLIYAASSLQSGVPSRFSGSGSGTDFTLTISSLQPEDFATYYCQQSYSTPPTFGPGTKVDIK

SEQ ID NO: 1450 - protein, 119 aa, Artificial Sequence
  Description of Artificial Sequence: Synthetic polypeptide
EVQLLESGGGLVQPGGSLRLSCAASGFTFSDFAMHWVRQAPGKGLEWISYISGDSGYTNYADSVKGRFTISRDNSKNTLYLQMNSLRAEDTAVYYCARDRPYYYYMDVWGKGTTVTVSS

SEQ ID NO: 1451 - protein, 119 aa, Artificial Sequence
  Description of Artificial Sequence: Synthetic polypeptide
EVQLLESGGGLVQPGGSLRLSCAASGFTFSDFWMSWVRQAPGKGLEWISYISGDSGYTNYADSVKGRFTISRDNSKNTLYLQMNSLRAEDTAVYYCARDRPYYYYMDVWGKGTTVTVSS

SEQ ID NO: 1452 - protein, 119 aa, Artificial Sequence
  Description of Artificial Sequence: Synthetic polypeptide
EVQLLESGGGLVQPGGSLRLSCAASGFTFSDFWMHWVRQAPGKGLEWVSYISGDSGYTNYADSVKGRFTISRDNSKNTLYLQMNSLRAEDTAVYYCARDRPYYYYMDVWGKGTTVTVSS

SEQ ID NO: 1453 - protein, 119 aa, Artificial Sequence
  Description of Artificial Sequence: Synthetic polypeptide
EVQLLESGGGLVQPGGSLRLSCAASGFTFSDFWMHWVRQAPGKGLEWISAISGDSGYTNYADSVKGRFTISRDNSKNTLYLQMNSLRAEDTAVYYCARDRPYYYYMDVWGKGTTVTVSS

SEQ ID NO: 1454 - protein, 119 aa, Artificial Sequence
  Description of Artificial Sequence: Synthetic polypeptide
EVQLLESGGGLVQPGGSLRLSCAASGFTFSDFWMHWVRQAPGKGLEWISYISGSSGYTNYADSVKGRFTISRDNSKNTLYLQMNSLRAEDTAVYYCARDRPYYYYMDVWGKGTTVTVSS

SEQ ID NO: 1455 - protein, 119 aa, Artificial Sequence
  Description of Artificial Sequence: Synthetic polypeptide
EVQLLESGGGLVQPGGSLRLSCAASGFTFSDFWMHWVRQAPGKGLEWISYISGDGGYTNYADSVKGRFTISRDNSKNTLYLQMNSLRAEDTAVYYCARDRPYYYYMDVWGKGTTVTVSS

SEQ ID NO: 1456 - protein, 119 aa, Artificial Sequence
  Description of Artificial Sequence: Synthetic polypeptide
EVQLLESGGGLVQPGGSLRLSCAASGFTFSDFWMHWVRQAPGKGLEWISYISGDSGSTNYADSVKGRFTISRDNSKNTLYLQMNSLRAEDTAVYYCARDRPYYYYMDVWGKGTTVTVSS

SEQ ID NO: 1457 - protein, 119 aa, Artificial Sequence
  Description of Artificial Sequence: Synthetic polypeptide
EVQLLESGGGLVQPGGSLRLSCAASGFTFSDFWMHWVRQAPGKGLEWISYISGDSGYTYYADSVKGRFTISRDNSKNTLYLQMNSLRAEDTAVYYCARDRPYYYYMDVWGKGTTVTVSS

SEQ ID NO: 1458 - protein, 119 aa, Artificial Sequence
  Description of Artificial Sequence: Synthetic polypeptide
EVQLLESGGGLVQPGGSLRLSCAASGFTFSDFWMHWVRQAPGKGLEWISYISGDSGYTNYAASVKGRFTISRDNSKNTLYLQMNSLRAEDTAVYYCARDRPYYYYMDVWGKGTTVTVSS

SEQ ID NO: 1459 - protein, 119 aa, Artificial Sequence
  Description of Artificial Sequence: Synthetic polypeptide
EVQLLESGGGLVQPGGSLRLSCAASGFTFSDFWMHWVRQAPGKGLEWISYISGDSGYTNYAQSVKGRFTISRDNSKNTLYLQMNSLRAEDTAVYYCARDRPYYYYMDVWGKGTTVTVSS

SEQ ID NO: 1460 - protein, 119 aa, Artificial Sequence
  Description of Artificial Sequence: Synthetic polypeptide
EVQLLESGGGLVQPGGSLRLSCAASGFTFSDFWMHWVRQAPGKGLEWISYISGDSGYTNYADSVKGRFTISRDASKNTLYLQMNSLRAEDTAVYYCARDRPYYYYMDVWGKGTTVTVSS

SEQ ID NO: 1461 - protein, 119 aa, Artificial Sequence
  Description of Artificial Sequence: Synthetic polypeptide
EVQLLESGGGLVQPGGSLRLSCAASGFTFSDFWMHWVRQAPGKGLEWISYISGDSGYTNYADSVKGRFTISRDNSKNTLYLQMASLRAEDTAVYYCARDRPYYYYMDVWGKGTTVTVSS

SEQ ID NO: 1462 - protein, 119 aa, Artificial Sequence
  Description of Artificial Sequence: Synthetic polypeptide
EVQLLESGGGLVQPGGSLRLSCAASGFTFSDFWMHWVRQAPGKGLEWISYISGDSGYTNYADSVKGRFTISRDNSKNTLYLQMGSLRAEDTAVYYCARDRPYYYYMDVWGKGTTVTVSS

SEQ ID NO: 1463 - protein, 119 aa, Artificial Sequence
  Description of Artificial Sequence: Synthetic polypeptide
EVQLLESGGGLVQPGGSLRLSCAASGFTFSDFWMHWVRQAPGKGLEWISYISGDSGYTNYADSVKGRFTISRDNSKNTLYLQMQSLRAEDTAVYYCARDRPYYYYMDVWGKGTTVTVSS

SEQ ID NO: 1464 - protein, 107 aa, Artificial Sequence
  Description of Artificial Sequence: Synthetic polypeptide
DIQMTQSPSSLSASVGDRVTITCRASQSVSRSLAWYQQKPGKAPKLLIYAASSLQSGVPSRFSGSGSGTDFTLTISSLQPEDFATYYCQQSKSYPVTFGQGTKVEIK

SEQ ID NO: 1465 - protein, 107 aa, Artificial Sequence
  Description of Artificial Sequence: Synthetic polypeptide
DIQMTQSPSSLSASVGDRVTITCRASQSVSRSLAWYQQKPGKAPKLLIYAASSLQSGVPSRFSGSGSGTDFTLTISSLQPEDFATYYCQQYYSYPVTFGQGTKVEIK

SEQ ID NO: 1466 - protein, 107 aa, Artificial Sequence
  Description of Artificial Sequence: Synthetic polypeptide
DIQMTQSPSSLSASVGDRVTITCRASQSVSRSLAWYQQKPGKAPKLLIYAASSLQSGVPSRFSGSGSGTDFTLTISSLQPEDFATYYCQQYKSTPVTFGQGTKVEIK

SEQ ID NO: 1467 - protein, 107 aa, Artificial Sequence
  Description of Artificial Sequence: Synthetic polypeptide
DIQMTQSPSSLSASVGDRVTITCRASQSVSRSLAWYQQKPGKAPKLLIYAASSLQSGVPSRFSGSGSGTDFTLTISSLQPEDFATYYCQQYKSYPRTFGQGTKVEIK

SEQ ID NO: 1468 - protein, 119 aa, Artificial Sequence
  Description of Artificial Sequence: Synthetic polypeptide
EVQLLESGGGLVQPGGSLRLSCAASGFTFSDFWMHWVRQAPGKGLEWISYISGDSGYTNYADSVKGRFTISRDNSKNTLYLQMNSLRAEDTAVYYCARDRPYDYYMDVWGKGTTVTVSS

SEQ ID NO: 1469 - protein, 119 aa, Artificial Sequence
  Description of Artificial Sequence: Synthetic polypeptide
EVQLLESGGGLVQPGGSLRLSCAASGFTFSDFWMHWVRQAPGKGLEWISYISGDSGYTNYADSVKGRFTISRDNSKNTLYLQMNSLRAEDTAVYYCARDRPYGYYMDVWGKGTTVTVSS

SEQ ID NO: 1470 - protein, 119 aa, Artificial Sequence
  Description of Artificial Sequence: Synthetic polypeptide
EVQLLESGGGLVQPGGSLRLSCAASGFTFSDFWMHWVRQAPGKGLEWISYISGDSGYTNYADSVKGRFTISRDNSKNTLYLQMNSLRAEDTAVYYCARDRPYNYYMDVWGKGTTVTVSS

SEQ ID NO: 1471 - protein, 119 aa, Artificial Sequence
  Description of Artificial Sequence: Synthetic polypeptide
EVQLLESGGGLVQPGGSLRLSCAASGFTFSDFWMHWVRQAPGKGLEWISYISGDSGYTNYADSVKGRFTISRDNSKNTLYLQMNSLRAEDTAVYYCARDRPYSYYMDVWGKGTTVTVSS

SEQ ID NO: 1472 - protein, 119 aa, Artificial Sequence
  Description of Artificial Sequence: Synthetic polypeptide
EVQLLESGGGLVQPGGSLRLSCAASGFTFSDFWMHWVRQAPGKGLEWISYISGDSGYTNYADSVKGRFTISRDNSKNTLYLQMNSLRAEDTAVYYCARDRPYYYDMDVWGKGTTVTVSS

SEQ ID NO: 1473 - protein, 119 aa, Artificial Sequence
  Description of Artificial Sequence: Synthetic polypeptide
EVQLLESGGGLVQPGGSLRLSCAASGFTFSDFWMHWVRQAPGKGLEWISYISGDSGYTNYADSVKGRFTISRDNSKNTLYLQMNSLRAEDTAVYYCARDRPYYYEMDVWGKGTTVTVSS

SEQ ID NO: 1474 - protein, 119 aa, Artificial Sequence
  Description of Artificial Sequence: Synthetic polypeptide
EVQLLESGGGLVQPGGSLRLSCAASGFTFSDFWMHWVRQAPGKGLEWISYISGDSGYTNYADSVKGRFTISRDNSKNTLYLQMNSLRAEDTAVYYCARDRPYYYKMDVWGKGTTVTVSS

SEQ ID NO: 1475 - protein, 119 aa, Artificial Sequence
  Description of Artificial Sequence: Synthetic polypeptide
EVQLLESGGGLVQPGGSLRLSCAASGFTFSDFWMHWVRQAPGKGLEWISYISGDSGYTNYADSVKGRFTISRDNSKNTLYLQMNSLRAEDTAVYYCARDRPYYYSMDVWGKGTTVTVSS

SEQ ID NO: 1476 - protein, 119 aa, Artificial Sequence
  Description of Artificial Sequence: Synthetic polypeptide
EVQLLESGGGLVQPGGSLRLSCAASGFTFSSYDMSWVRQAPGKGLEWVSGITISGGSTYYADSVKGRFTISRDNSKNTLYLQMNSLRAEDTAVYYCARGRGGSGWLDYWGQGTTVTVSS

SEQ ID NO: 1477 - protein, 119 aa, Artificial Sequence
  Description of Artificial Sequence: Synthetic polypeptide
EVQLLESGGGLVQPGGSLRLSCAASGFTFSSYWMHWVRQAPGKGLEWVSYISGSGGYTNYADSVKGRFTISRDNSKNTLYLQMNSLRAEDTAVYYCARDRPYYYDIDVWGKGTTVTVSS

SEQ ID NO: 1478 - protein, 113 aa, Artificial Sequence
  Description of Artificial Sequence: Synthetic polypeptide
EVQLVQSGAEVKKPGASVKVSCKASGYSFTSYYMHWVRQAPGQGLEWMGIINPSGGSTSYAQKFQGRVTMTRDTSTSTVYMELSSLRSEDTAVYYCASGWVYWGQGTLVTVSS

SEQ ID NO: 1479 - protein, 107 aa, Artificial Sequence
  Description of Artificial Sequence: Synthetic polypeptide
DIQMTQSPSSLSASVGDRVTITCRASQSISSYLAWYQQKPGKAPKLLIYAASSLQSGVPSRFSGSGSGTDFTLTISSLQPEDFATYYCQQSYSTPPTFGPGTKVDIK

SEQ ID NO: 1480 - protein, 119 aa, Artificial Sequence
  Description of Artificial Sequence: Synthetic polypeptide
EVQLLESGGGLVQPGGSLRLSCAASGFTFSSYWMHWVRQAPGKGLEWVSYISGSGGYTNYADSVKGRFTISRDNSKNTLYLQMNSLRAEDTAVYYCARDRPYYYDLDVWGKGTTVTVSS

SEQ ID NO: 1481 - protein, 9 aa, Artificial Sequence
  Description of Artificial Sequence: Synthetic peptide
FTFSNSDMS

SEQ ID NO: 1482 - protein, 14 aa, Artificial Sequence
  Description of Artificial Sequence: Synthetic peptide
VSGITISGGSTYYA

SEQ ID NO: 1483 - protein, 12 aa, Artificial Sequence
  Description of Artificial Sequence: Synthetic peptide
ARGRGGSGWLDY

SEQ ID NO: 1484 - protein, 17 aa, Artificial Sequence
  Description of Artificial Sequence: Synthetic peptide
KSSQSVLYSPNNKNYLA

SEQ ID NO: 1485 - protein, 7 aa, Artificial Sequence
  Description of Artificial Sequence: Synthetic peptide
WASTRES

SEQ ID NO: 1486 - protein, 9 aa, Artificial Sequence
  Description of Artificial Sequence: Synthetic peptide
QQYYTTPPT

SEQ ID NO: 1487 - protein, 9 aa, Artificial Sequence
  Description of Artificial Sequence: Synthetic peptide
FTFSSYDMS

SEQ ID NO: 1488 - protein, 14 aa, Artificial Sequence
  Description of Artificial Sequence: Synthetic peptide
MGIIAPSGGSTSYA

SEQ ID NO: 1489 - protein, 6 aa, Artificial Sequence
  Description of Artificial Sequence: Synthetic peptide
ASGWVY

SEQ ID NO: 1490 - protein, 11 aa, Artificial Sequence
  Description of Artificial Sequence: Synthetic peptide
QASRDIKNYLA

SEQ ID NO: 1491 - protein, 7 aa, Artificial Sequence
  Description of Artificial Sequence: Synthetic peptide
AASSLQS

SEQ ID NO: 1492 - protein, 9 aa, Artificial Sequence
  Description of Artificial Sequence: Synthetic peptide
QQSYSTPPT

SEQ ID NO: 1493 - protein, 9 aa, Artificial Sequence
  Description of Artificial Sequence: Synthetic peptide
FTFSDFWMH

SEQ ID NO: 1494 - protein, 13 aa, Artificial Sequence
  Description of Artificial Sequence: Synthetic peptide
SYISGDSGYTNYA

SEQ ID NO: 1495 - protein, 14 aa, Artificial Sequence [sequence omitted]

SEQ ID NO: 1496 - protein, 11 aa, Artificial Sequence
  Description of Artificial Sequence: Synthetic peptide
RASQSVSRSLA

SEQ ID NO: 1497 - protein, 5 aa, Artificial Sequence
  Description of Artificial Sequence: Synthetic peptide
SSLQS

SEQ ID NO: 1498 - protein, 9 aa, Artificial Sequence
  Description of Artificial Sequence: Synthetic peptide
QQYKSYPVT

SEQ ID NO: 1499 - protein, 9 aa, Artificial Sequence
  Description of Artificial Sequence: Synthetic peptide
FTFSSYWMH

SEQ ID NO: 1500 - protein, 13 aa, Artificial Sequence
  Description of Artificial Sequence: Synthetic peptide
SAISGSSGSTYYA

SEQ ID NO: 1501 - protein, 14 aa, Artificial Sequence
  Description of Artificial Sequence: Synthetic peptide
CARDRPYGYYMDVW

SEQ ID NO: 1502 - protein, 11 aa, Artificial Sequence
  Description of Artificial Sequence: Synthetic peptide
RASQSISSSLA

SEQ ID NO: 1503 - protein, 14 aa, Artificial Sequence [sequence omitted]

SEQ ID NO: 1504 - protein, 11 aa, Artificial Sequence
  Description of Artificial Sequence: Synthetic peptide
RASQSISRSLA

SEQ ID NO: 1505 - protein, 13 aa, Artificial Sequence
  Description of Artificial Sequence: Synthetic peptide
SAISGSGGSTYYA

SEQ ID NO: 1506 - protein, 13 aa, Artificial Sequence
  Description of Artificial Sequence: Synthetic peptide
SYISGSGGYTNYA

SEQ ID NO: 1507 - protein, 14 aa, Artificial Sequence
  Description of Artificial Sequence: Synthetic peptide
CARDRPYYYDMDVW

SEQ ID NO: 1508 - protein, 9 aa, Artificial Sequence
  Description of Artificial Sequence: Synthetic peptide
FTFSSFWMH

SEQ ID NO: 1509 - protein, 9 aa, Artificial Sequence
  Description of Artificial Sequence: Synthetic peptide
FTFSDYWMH

SEQ ID NO: 1510 - protein, 9 aa, Artificial Sequence
  Description of Artificial Sequence: Synthetic peptide
FTFSDFAMH

SEQ ID NO: 1511 - protein, 9 aa, Artificial Sequence
  Description of Artificial Sequence: Synthetic peptide
FTFSDFWMS

SEQ ID NO: 1512 - protein, 13 aa, Artificial Sequence
  Description of Artificial Sequence: Synthetic peptide
SAISGDSGYTNYA

SEQ ID NO: 1513 - protein, 13 aa, Artificial Sequence
  Description of Artificial Sequence: Synthetic peptide
SYISGSSGYTNYA

SEQ ID NO: 1514 - protein, 13 aa, Artificial Sequence
  Description of Artificial Sequence: Synthetic peptide
SYISGDGGYTNYA

SEQ ID NO: 1515 - protein, 13 aa, Artificial Sequence
  Description of Artificial Sequence: Synthetic peptide
SYISGDSGSTNYA

SEQ ID NO: 1516 - protein, 13 aa, Artificial Sequence
  Description of Artificial Sequence: Synthetic peptide
SYISGDSGYTYYA

SEQ ID NO: 1517 - protein, 11 aa, Artificial Sequence
  Description of Artificial Sequence: Synthetic peptide
RASQSVSSSLA

SEQ ID NO: 1518 - protein, 11 aa, Artificial Sequence
  Description of Artificial Sequence: Synthetic peptide
RASQSVSRYLA

SEQ ID NO: 1519 - protein, 11 aa, Artificial Sequence
  Description of Artificial Sequence: Synthetic peptide
RASQSVSRSLN

SEQ ID NO: 1520 - protein, 9 aa, Artificial Sequence
  Description of Artificial Sequence: Synthetic peptide
QQSKSYPVT

SEQ ID NO: 1521 - protein, 9 aa, Artificial Sequence
  Description of Artificial Sequence: Synthetic peptide
QQYYSYPVT

SEQ ID NO: 1522 - protein, 9 aa, Artificial Sequence
  Description of Artificial Sequence: Synthetic peptide
QQYKSTPVT

SEQ ID NO: 1523 - protein, 9 aa, Artificial Sequence
  Description of Artificial Sequence: Synthetic peptide
QQYKSYPRT

SEQ ID NO: 1524 - protein, 14 aa, Artificial Sequence
  Description of Artificial Sequence: Synthetic peptide
CARDRPTYYYMDVW

SEQ ID NO: 1525 - protein, 14 aa, Artificial Sequence
  Description of Artificial Sequence: Synthetic peptide
CARDRPYDYYMDVW

SEQ ID NO: 1526 - protein, 14 aa, Artificial Sequence
  Description of Artificial Sequence: Synthetic peptide
CARDRPYNYYMDVW

SEQ ID NO: 1527 - protein, 14 aa, Artificial Sequence
  Description of Artificial Sequence: Synthetic peptide
CARDRPYSYYMDVW

SEQ ID NO: 1528 - protein, 14 aa, Artificial Sequence
  Description of Artificial Sequence: Synthetic peptide
CARDRPYYYEMDVW

SEQ ID NO: 1529 - protein, 14 aa, Artificial Sequence
  Description of Artificial Sequence: Synthetic peptide
CARDRPYYYKMDVW

SEQ ID NO: 1530 - protein, 14 aa, Artificial Sequence
  Description of Artificial Sequence: Synthetic peptide
CARDRPYYYSMDVW

SEQ ID NO: 1531 - protein, 14 aa, Artificial Sequence
  Description of Artificial Sequence: Synthetic peptide
CARDRPYYYDIDVW

SEQ ID NO: 1532 - protein, 14 aa, Artificial Sequence
  Description of Artificial Sequence: Synthetic peptide
CARDRPYYYDLDVW

SEQ ID NO: 1533 - protein, 24 aa, Artificial Sequence
  Description of Artificial Sequence: Synthetic peptide
MKWVTFISLLFLFSSAYSRGVFRR

SEQ ID NO: 1534-1541 - skipped (8 entries)

SEQ ID NO: 1542 - protein, 119 aa, Artificial Sequence
  Description of Artificial Sequence: Synthetic polypeptide
EVQLLESGGGLVQPGGSLRLSCAASGFTFSSYWMHWVRQAPGKCLEWVSYISGSGGYTNYADSVKGRFTISRDNSKNTLYLQMNSLRAEDTAVYYCARDRPYYYDMDVWGKGTTVTVSS

SEQ ID NO: 1543 - protein, 107 aa, Artificial Sequence
  Description of Artificial Sequence: Synthetic polypeptide
DIQMTQSPSSLSASVGDRVTITCRASQSISSSLAWYQQKPGKAPKLLIYAASSLQSGVPSRFSGSGSGTDFTLTISSLQPEDFATYYCQQYKSYPVTFGCGTKVEIK

SEQ ID NO: 1544 - protein, 119 aa, Artificial Sequence
  Description of Artificial Sequence: Synthetic polypeptide
EVQLLESGGGLVQPGGSLRLSCAASGFTFSSYWMHWVRQAPGKCLEWVSYISGSGGYTNYADSVKGRFTISRDNSKNTLYLQMNSLRAEDTAVYYCARDRPYYYDIDVWGKGTTVTVSS

SEQ ID NO: 1545 - protein, 119 aa, Artificial Sequence
  Description of Artificial Sequence: Synthetic polypeptide
EVQLLESGGGLVQPGGSLRLSCAASGFTFSSYWMHWVRQAPGKCLEWVSYISGSGGYTNYADSVKGRFTISRDNSKNTLYLQMNSLRAEDTAVYYCARDRPYYYDLDVWGKGTTVTVSS

SEQ ID NO: 1546 - protein, 15 aa, Artificial Sequence
  Description of Artificial Sequence: Synthetic peptide
GGGSEGGGSEGGGSE

SEQ ID NO: 1547 - protein, 50 aa, Artificial Sequence
  Description of Artificial Sequence: Synthetic polypeptide
  SITE (1)..(50): This sequence may encompass 1-10 "Gly Gly Gly Ser Glu" repeating units
GGGSEGGGSEGGGSEGGGSEGGGSEGGGSEGGGSEGGGSEGGGSEGGGSE

SEQ ID NO: 1548 - protein, 120 aa, Artificial Sequence
  Description of Artificial Sequence: Synthetic polypeptide
EVQLLESGGGLVQPGGSLRLSCAASGFTFSDFWMHWVRQAPGKGLEWISYISGDSGYTNYADSVKGRFTISRDNSKNTLYLQMNSLRAEDTAVYYCARDRPYYYYMDVWGKGTTVTVSSV

SEQ ID NO: 1549 - protein, 25 aa, Artificial Sequence
  Description of Artificial Sequence: Synthetic peptide
  SITE (1)..(25): This sequence may encompass 1-5 "Gly Gly Gly Gly Ser" repeating units
GGGGSGGGGSGGGGSGGGGSGGGGS

SEQ ID NO: 1550 - protein, 50 aa, Artificial Sequence
  Description of Artificial Sequence: Synthetic polypeptide
  SITE (1)..(50): This sequence may encompass 1-10 "Gly Gly Gly Gly Ser" repeating units
GGGGSGGGGSGGGGSGGGGSGGGGSGGGGSGGGGSGGGGSGGGGSGGGGS

SEQ ID NO: 1551 - protein, 50 aa, Artificial Sequence
  Description of Artificial Sequence: Synthetic polypeptide
  SITE (1)..(50): This sequence may encompass 1-10 "Gly Gly Gly Gly Ala" repeating units
GGGGAGGGGAGGGGAGGGGAGGGGAGGGGAGGGGAGGGGAGGGGAGGGGA

SEQ ID NO: 1552 - protein, 133 aa, Artificial Sequence; identical to SEQ ID NO: 41
  Description of Artificial Sequence: Synthetic polypeptide

SEQ ID NO: 1553 - protein, 226 aa, Artificial Sequence; identical to SEQ ID NO: 21
  Description of Artificial Sequence: Synthetic polypeptide

SEQ ID NO: 1554 - protein, 394 aa, Artificial Sequence
  Description of Artificial Sequence: Synthetic polypeptide
  MOD_RES (134)..(153): This region may encompass one of the following sequences: "GGGGSGGGGSGGGGS" or "GGGGSGGGGSGGGGSGGGGS"
  MOD_RES (380)..(394): This region may encompass one of the following sequences: "GGGGS" or "GGGGSGGGGS" or "GGGGSGGGGSGGGGS"
APTSSSTKKTQLQLEHLLLDLQMILNGINNYKNPKLTRMLTFKFYMPKKATELKHLQCLEEELKPLEEALNLAPSKNFHLRPRDLISDINVIVLELKGSETTFMCEYADETATIVEFINRWITFSQSIISTLTXXXXXXXXXXXXXXXXXXXXDKTHTCPPCPAPEAAGAPSVFLFPPKPKDTLMISRTPEVTCVVVDVSHEDPEVKFNWYVDGVEVHNAKTKPREEQYNSTYRVVSVLTVLHQDWLNGKEYKCKVSNKALPAPIEKTISKAKGQPREPQVYTLPPSREEMTKNQVSLTCLVKGFYPSDIAVEWESNGQPENNYKTTPPVLDSDGSFFLYSKLTVDKSRWQQGNVFSCSVMHEALHNHYTQKSLSLSPGXXXXXXXXXXXXXXX
